United States Patent Application Publication US 2026/0286376 A1, published September 24, 2026 (application 19/477,056).

The application's sequence listing, which the Patent Office published only in electronic form, follows.

SEQUENCE LISTING (411 sequences)

SEQ ID NO: 1 - DNA, 1582 bp, Arabidopsis thaliana
  source 1..1582: mol_type = genomic DNA
ggttaagagtttcgttttccttcgttcaaaatctaatgtgaaggaaagcaaaactgacacaacttttgtgtgaaccagagcaagtgaaagtgtgtcgaatctgtacttttgtactgtgtaatctctatagtctgactctcattatgtagttttaagtgtcttttacttgtgtagctgttacctgttacctgttaggttttctaatccttgttttatttgatagccagatactttagggaattttacttcttcttttcttgggtttaatttaagacatattcgtatatttcatttaattctgttatctgatttgtgagatcatgaaaacgaatgttgaacttgaaacttgagtgggttcagaaaaactactctgtattaaaaatcccagtgtcacatgataatgatccttcagtaaaggtagacatagcttttttgcagtgtgatatgcacaaatacaatctatatttttatgtaaaagatatatttctttgaaagtacttataaaaatatgtttttcataaaaaaaattatatgtaattctgaaagtatgtgatatgcacaagcacaacctatatttcctacattcaaattcgggtttttcttgacgccaagttacattcaattatcaataatagggctagttcaactaatgctatttatttatacaatccacccactactaaatctcaatctccaaggatctttatatattaataagaaaagctactatccaaatgcgaccttgttcgtgaagtgtttggtttataatttggtggcttaagactatagcccaccattgacccaaaaaaagaaaggaaaattaatagtagactatatagctaccaactccctataatttaccttgaaattaaaccagctttgtatttttttaatagaagtcagggctctacagtttcattttaaacttttttttttgttatattacatcctgcaggttagttgtaatttgtaaacgtaatcaacataataaaaccatttacatagactgattaaagttgattccatttgataatatttagctatttatatatcaatcaaccaccagctcttaaatatatgtattcaaattgttttgttgactctttttgctacactttaaatttgaatctagaatgttgtcctgaaacaaaaatctgtggattgaacaaaattatacaccaggtaaaattttgaagtttttaaaagcaggatcacatactcctaattttagattggatagatctagtataaaaatatgaagtttttttcccaaaaaataataataccatttagctcttaattaaatgcatgcaaactaaagataaaaagaggaattattttaaccattctaactcgtcacaacatgcctaatcattccaggttaattttagagttttcaaatcgtcatattaacatgtgatcctgaagactcttctcttctttcttctaccattagctgaaatctttacttgtaccacaattaacctcaaaccctagcccctaaatccccctagaaatcaatccatcctcagttctccaaaaagatatctttggtttttcttcactgacaaaacccctaaaa

SEQ ID NO: 2 - DNA, 2082 bp, Arabidopsis thaliana
  source 1..2082: mol_type = genomic DNA
catctacaaagcctataaaatggaaagatgtatgcatcgatgatgattctgcctcacttagaagaatcaaaaagctaaaaggagctgcgaatcctgggcaacgatgacttagtatgtatagaagaaaaaaaaagcttttacttggtatcaaacagagcatgtgttgttgtatttgctacctttttctgcaaagttattggcaattgtattgttgttccacttgtatatatacagagaccatttatgttaatatacaacttcgtatggggaaagatgattccatcaagtccaaaatgccaaaaccatgcacgatcttgtctgatcaagtatgataagatgtgagattttaagaacgtgaagcttttcatattgtattctcaatgaacgaagaattaataattagagttagaaatgcagattacagagattacacaatttgatctcatttcttggcaaagaggcccaggccaccgaagccaccgtccttctttggattcctgtgtgttaattttcgtgtggctttagttacaaagggattatattgtcagcgaatctgagccgttggatcgttttgacatgagctttccataagtgtcttatcctttgtttctctcatttttcacatatgtatcagacatttaatcaagcacatatctacgtgttgattatgttgatgatgctgagattatgttgatttagagaatgagtattggtgatgatggtacacgttagtaaacatatgaatttggaagtgccacgtgagagggagcagagttttgggctttcttttggttatgtatttgcattcttgttgtaacaaattctcttattaaaagcattgtgaaaaaaaccaaataccacatagtctatgtttcaagatttgttttttaatactataattttctattactttagtttgtgtaatttttgaaaagagaaaattggtattttttaggattgggtgatctgaaatttgactacaaaaattttcttggacacagacacacagtcacacaaataagctaattattggaattttatcttaagttgcattcactttgcaaattaatattgaattatagactattagtgtatggcgtgatggcaaacaaaaaaatcagtgtgtgatattgtggactagccaaaaaaattttctgatgatttttttgcctaaataatttgaattgttgagaccgaaactcttactaatatactaacaatgtaacgcgacaaataaaacattgttgagaataaaatctgaaccatcataactatagtctatagtaaccgtccgaattcaaccacatatgtatgatctttgccatttttgatcatattttccgttgcgttttctttgaattttctcaatatatttttagtgttttgatttgtacttttatctaatttatataattgtttttcaaatgtttcgcaattgtgcgtttaagtattcgactcgaagtaaacccagtttcttagaatgggctaactgccattgaccaaatctttatccgcgaagaaagatctttagcagctaggcttatttcatatcaacaaaagtatatatttatctctaactaaattcctacaattatttcaaaaacatagaaattaaaatttgaaatgcctattcttttttggttatacattgcaaaggttatgtatgtaatttctgatcttgaaatttaagttctttagcccatatctagttgattttcacgaaatattgtcgtttactctcgtttttatatataaagcatgtacatataacatataatcaatgcttcaaaagaaaaaaataatcataactaaattgaaacgggaaaactaatttgctttcgtgttctattatgccaaactgtactcacaatagtcttatcctatcgacccaaatttaatcttcccaactacttactcctaattgaaacaaaatataacctttcttactatagcctatatttaaaaaatatctatgatttctacatttatatatatacgcacacggcacatacctctcattcaccatatatgcctcttaacaatctctccacagaacaaaagcaaaaagcctaaaccgggata

SEQ ID NO: 3 - DNA, 2010 bp, Arabidopsis thaliana
  source 1..2010: mol_type = genomic DNA
agctcaaacctttaaatggcttttaattagatatatttagcgagaatgtgattgctagtgaaatctcaaacttgatagcttattcatagcttattttacttcgatcagcaagagaacaatggttcctaaagctcaaaccttttttggcgtttgctttagattgtgcatacataaagtgagaagatgaaatatggttttgctgaaatctcaatgtgctcattcatagtttattttgctcgacctttctttaatcaatagctttgatgtactgattactttataaagttaagaagtaagttctgctctttaaactgtactgaatggaggcttctctgcataattaagcaaacactctgatgattgagtttcgttgtacaaaggaaagtttttgccttagttagaaattcatcttgtttctttgcccagaagctggcttgctgatagaatttggactacgctacgttttcttgggtgaaaaacaatccgcgtccttccacgagaacagtgaaactgtacgatgttcttattgtattgtgtcaacagcccataatcaatgaaatgggcctcaatgacagtataagccgaaaaatattcgaatgcgatctagaactaatctgaaaccaaacttctcaaatcattaacatttgattagggcctaaaagtccatccgtattttaaaaaaaagttgataacaaatgcaaaaatacaaatatacattactattaaaactcaatctttctgattatatgtggatggagaagctgttttgcagtgtggatttgaattttgaagttcttgttcaaaaaagaaaagaaacttggtcaagcttcaaaagaaagaaagaaataaagacaagtatacaaatacgttgacttcaattaatatgaagatagaagagaaagatatagaaatgcgttttaaattggcggtgggagatatgtgattcccttggtcccgctttctcgtttgattcggtaacctaaaccttctccatccaagaagacacaaacaaggaagaaattaacctacgtacgtacatcatttgaactacttatatctattataaatggaaaatctattttcttcttctctctcttttaaccgaaaaaggaaaagtcctcgaaataactctttaatataattcatgtggaaaccttctatatattttttgcatgcttttttgaaattaagtaatggcatactaattagaagaagacgaaaaataatatgtctaagtaattgagtttcgtggtcaaggcaaatcaagattgcattctttaattaagtgtacaaattatgatgtaagaaccgttatttggcataacctaatatatattaaaaactgattttttttttttttaacttctgtaagaaatggttttcttaattaccaatcatgatctattattgtaaaatgtgtaattttgtgttgcgattgaagtgttcttagataaagatatgtcatatgcatgatatcatctatttgattttgagaaaataaaaacataacatgagaacatcgtagagagtaagatacatgacaaagagaaagaataagctaagaagtcatccaaaaattgggaggcctactctcaactaccaaaaatacaagtgtttgttgtgttaggtcatttattcagtcacctaaccctaactatatgaaatacgttaaaattcatatatagaaaaataaagaagaaatactattagtcaatataattttttttaacaaaataaaaataaagaaagaaacactattagtcaatgaattaaaaaaaaaaaaatccatctttcgatcaagaccgtccaagtattctcctttcacataactcttacgttttacactaaacaagacgagatttttatgagcttgtggctcccacaacaatcctcattgatttctccatatatatcacatgagaatccaactcgacttcatactaacattcatcccaaaagttccattctttttcacaaagccattgtgctgttttctccatttggatcaaa

SEQ ID NO: 4 - DNA, 2146 bp, Arabidopsis thaliana
  source 1..2146: mol_type = genomic DNA
tgatcgcaaacgtcaatggtctatatccatctcttggggatacaccattcagatatacacttacttcttgactgctacggagctgactacgccgttgcagaccttcaaaacttggcggtcttccagcgatggacctttcgtgtttaacactcggcccttgaaacctgacccctgtgagcgtccggtcacttatttcatggatggtgccgaggatgtacgggatagtgggacgaaaacttggtatagcataggggataagaactatggtcattgcggaaagattgagcatactcgattaactaaagtgaagaggatattggtgacttcaatgaagacggatcctgagtattggaacaaggtacttagtgtttgtatatttctcatattgaatttaacattttgggtgagtttaggttacatctttttttttattttttgcttttgttgataggcaccgaggagacagtgttgtgaggtgatggaaggaaaagtaggaaaaagaaaagagaaagaaatgttgttaaggattagaaaatgcagatctttggagaagatataaaaaaagcgttttaattagagagatttttgcacatacagatttagattcgatcattagttatttgtttctaaattcctcaattcctagtaccaagagaatgacgattttctctagtaatactggcactcttcgtttttcaacatgtaaacattactttgtataattagtctatatcaaataaatagttacaacatgaacgtaactatttatacacgagggtaaatttttaacaaatttaaaccgaaccaaaaagatttcagttaatcatagttttgttacaagcgaaatctgaaatattcaccctcaagtttgttacgtaattgtctaatctgtgtttttttgtgctagtgttataattgtttcctcgaatgttaagcaccacatagaagtatacacttttcttttattattttcgttcttcttccatttagaaacttttattaattctactgttaaatccaacgttattagtttattttctctgatgaagttctaattttttttgtttgttggaaaaagggttacttttctgatgaagttgccgatttgtttccaaccaaacctcagctaatatagttagggagacggataagaaattgcataaagggagaggctttgtaaacacgcaagtttacgtcaacttgacacatataaactcgtatataggaattgtgtaaaatgttaatcaatatatgtttatgaatatagtccttttatttccttaatctatagtcatgttatcatcatatcggcaagaaaattactattacaacatatgtttccgtgcttcgatttgtcgatcaggtaggcaaccaaaccgggccagattagtcacaaatgaaattaggctccactttggcaagttttttcacaattaaaaattagaaagtctaaccaaactaatagaaactgaaccaaacaaaaatgttcacgcaattacgtagcacttctctatgaaatactgtggataattcgatttgagctaatctatggtaagtcgtttctctcaaactgaattaagctaaaccaaaccgaaaataaaccgttgtagaacacccataataaacatatatatgttctctactcttatttggctatttttccatttgcagatacgtgtgacaacattccaaatataggcacatgatacaaattacaaagccagaaattataatttataaactatacataataaggtcagtagcctaattacatccatatatttagttgggcataataaggatagcctaattttggtgcatcccgccaaaaattcggacaaatggtgaatttcaaaccatgaatttctttgttatacatacattacgtgcactattacatcaaagaaaaatagtgacgtgcataaacgtattttcttcacataatctatatataatatatacagccatgtacatttttcaacatagaaaaatcatgtatacaaatacggtaggtgcaatactgataaactgccattcccattgcattagacgctagtcaatccaaaccttataacataaaaagttatagtccatttctttcatatccaatcgagtcaaaataatattcgagcaaaaaacaaaagaa

SEQ ID NO: 5 - DNA, 1649 bp, Arabidopsis thaliana
  source 1..1649: mol_type = genomic DNA
ctttcctctgaaacgattctccacgctctttgtttataaggattgcaagaaattactgaagaacatcaggaatcgcgagagcttggggcgaatcaaaaacctccattgatgaagaagactgcatctagtactttacttactcggtagcacacctccatgggcaggctccagcaccatggttgggcccatttcttattaatgggcctaaaatagagcttctagggcctctatatattttgtcttttctcttccgtttaggcgttttgctaactttcttacgtatatgaatgtgaattatagttagttaactttagaactgttgagcggccaatgccacgtcctttgtacgtaaattatgttattcatgctattatttatgtaccaattttctattctaatatatattctaagttttttttgtatcaatactaagtatttatacaatttttgcaaattttgacagaaagatagtacaaaaaatatgaaagaccaaaaactacataaaccaccaaaaattacaacacaaacagaaaacggaaagaaaactcaatcgaaaactctacaagtagagaccttaaaagaaacttagattccaaaccacaaagctcaaatatttgtgtggtttcctcaacttaaaagatctcaaatacttatagttgttgccactagcaatccaaacctaggccagttttcaaaatctctaaaaaagagcttaccattccaaacttaggacaatcctcataatattttaaattttatgacattttttagttttttcttaccgaacatagagatacaacgaataacacaaaataccaaattttactaaacaaacaattactgcacaaatgaaaaagtaatcaacaacatgagctcatttcacgaaaaaagaagcgaaaaagccaacggtcttgccacaaattagtatattgcaaattacaaatgcttaaaaaaattcacagatatattcatcaattataccttttgattatcttgcaaataaatcttccaattcatattacctacgtcaaaatttagccatctacccttattatcccattatgaaaatttcaaaatcgataagatgacagacacccaacaacgaattatcattttatatactataggtattagatacctacaatttatttggtttattgggaatatacgattcataaattccctcataaaaatataaagcaaatgtggacggaagcaaaaaaactaaatatagaatggagagaaattgtattattaacttaggttacccatcgccaacaacctctcatttcctttcctaaactatttcacaattttggtcaaaaacacaatctaaccccaaaaaagattcgacctttgaaattcccaaaaccagaagcaaaacccccaaaagaaccctacttatagtgaaagaaaagtaacataataatatatatacacgagaaccaagagccacttgaatataaagttcacagtttttgtctgctcaccaaatcaaaccaatttctcctgatagccaaagtttttgtccccaacaagaaactcatgcaacattcttcacccactagctaactaacgacttccattcttattaatctctctcaattcttcatttctgagattcatcgctctctcttctctttgtcaca

SEQ ID NO: 6 - DNA, 2247 bp, Arabidopsis thaliana
  source 1..2247: mol_type = genomic DNA
tctgagacatcattgatatctaacaatcaaaaactaaaaagtgaagtattaacattttaatcagattcaaaccagaacttatcagtcatcaaaaatgttggcaaataacaaatcaaacttaagtttttggatggagaaagcaagctagattcgaatctctaagaagcgtggacttggacttgtttacgacctgaaaagatgtcatgattatctcatgattacgagataataacatgtcttatctactaaactaatctaaaaagtagtgaggatgacttgaaacttaagtcttatatgaattatctttaaatatagaaaaagaaaggagatagagaggtgtgtttttcatgtgaacaacttttttttacctttagagtacttccagaagacttattgggtccttaataaaagtagaccaaattattgaagagctaaaaaaaaatgcctactcaaaatatccaaacctcttcttttagccttttgtttttttcaatattcatactaatgtaaactacaatcattgtatcattctataatcatatgaattttttgtcaacaccatgcattatgctagtttaaatttaggtgatgatataaagatattttaagtacaaatcaataggggcgatgttcttatgtctttatctaactttatgaatttgtgttttatatattatgaaaaattggaaaagaagagatggcctacgctcaagaccaattcctaccaatgggcaatggtgttgaaatctgaacaaaaaaatttcctttctttaacgttagctttaaagttcaaaaaactttatttactttttcagtgataattctgtataaaataacatataacaatgaggaaaaaactcaataatttgaatcgcttatgactttatttctccaagtgcttgacttttaaaaccctaatgtccaatctcaactaaagtcaacctttttcgttcgtctagaagagtcagtcattaagtttcaattgaagtatacagtaaattattagtactttttattttattttaaccacagttcattggctgtatgagatttctgttcaagaaaacatataaatcgaaaccaaagcaaaagacattatttgcttcggtttcttctactcaagctcatttttagtaaaactaaattgtattttcattttcttaaaaagttaattgttttttttgtaaaatcagttttaccaaattggacacaataatgaatatatgtctatgtctagttttttttagctcagaatatatcttatgtgaatagaatcgtctatcagatatttttgtgatgcagatagaacttaccgttatagaatcatttgtagattgttcatcgtgattgttaagattagattcccatttgtaatataacagaaactcgaaaagtacttatattaagtattaacgatgtatcatgtgaccaaaatagaaaatactacgtaatgatatgattattaagcgagtgtgtaggtaattcaaatatttcaattaatcaatctttgatatcactctttagagtaatgtattatctttcttattgttttaccctgggattaataagtttaccggatccggagtagaatttcttcggtttggcaattttgttcacctaccataacgaacttttacccttatacttagtttcaatctacttttggtgcatcctttcattttcaactgcaaagaagtagttaaaagatccaatacataatatatttaatttatcataagtaacttagtgtaaagaaagactaaagtactttttaaaatatgtatttgtatttcccgatgtgaaagaaaagaaaattgaatttgcacatatcaataatattagctaggaaaaaacttgtgagaaatttctttgacgacttgcgtgtgcaatagtcttccttatcttctctaccatttcttaattccactattgtatagtatttacttatgttgaattaataaattaaaacatttaaatttccctaaagttactttttgatttttgattttctatttttattacaactttcctactttttgacatcttttcttacaaagactttttgacatctccccctccagctattatatagtctccttttttcttttctgcattcacataatatttcccctatatagtttacacaacatcatacccaccaacatatataatcttgatcatagagagataaacagaggccgctatcaagaacaagactaagaacaagacttcactaggagtacaagt

SEQ ID NO: 7 - DNA, 11506 bp, synthetic construct
  misc_feature 1..11506: note = pFACT::MYB41 construct
  source 1..11506: mol_type = other DNA
agctcgaattatcatacatgagaattaagggagtcacgttatgacccccgccgatgacgcgggacaagccgttttacgtttggaactgacagaaccgcaacgttgaaggagccactgagccgcgggtttctggagtttaatgagctaagcacatacgtcagaaaccattattgcgcgttcaaaagtcgcctaaggtcactatcagctagcaaatatttcttgtcaaaaatgctccactgacgttccataaattcccctcggtatccaattagagtctcatattcactctcaactcgatcgaggggatctaccatgagcccagaacgacgcccggccgacatccgccgtgccaccgaggcggacatgccggcggtctgcaccatcgtcaaccactacatcgagacaagcacggtcaacttccgtaccgagccgcaggaaccgcaggagtggacggacgacctcgtccgtctgcgggagcgctatccctggctcgtcgccgaggtggacggcgaggtcgccggcatcgcctacgcgggtccctggaaggcacgcaacgcctacgactggacggccgagtcgaccgtgtacgtctccccccgccaccagcggacgggactgggctccacgctctacacccacctgctgaagtccctggaggcacagggcttcaagagcgtggtcgctgtcatcgggctgcccaacgacccgagcgtgcgcatgcacgaggcgctcggatatgccccccgcggcatgctgcgggcggccggcttcaagcacgggaactggcatgacgtgggtttctggcagctggacttcagcctgccggtgccgccccgtccggtcctgcccgtcaccgaaatctgatgacccctagagtcaagcagatcgttcaaacatttggcaataaagtttcttaagattgaatcctgttgccggtcttgcgatgattatcatataatttctgttgaattacgttaagcatgtaataattaacatgtaatgcatgacgttatttatgagatgggtttttatgattagagtcccgcaattatacatttaatacgcgatagaaaacaaaatatagcgcgcaaactaggataaattatcgcgcgcggtgtcatctatatgttactagatcgaccggcatgcaagctgataattcaattcggcgttaattcagtacattaaaaacgtccgcaatgtgttattaagttgtctaagcgtcaatttgtttacaccacaatatatcctgccaccagccagccaacagctccccgaccggcagctcggcacaaaatcaccactcgatacaggcagcccatcagtccgggacggcgtcagcgggagagccgttgtaaggcggcagactttgctcatgttaccgatgctattcggaagaacggcaactaagctgccgggtttgaaacacggatgatctcgcggagggtagcatgttgattgtaacgatgacagagcgttgctgcctgtgatcaattcgggcacgaacccagtggacataagcctcgttcggttcgtaagctgtaatgcaagtagcgtaactgccgtcacgcaactggtccagaaccttgaccgaacgcagcggtggtaacggcgcagtggcggttttcatggcttcttgttatgacatgtttttttggggtacagtctatgcctcgggcatccaagcagcaagcgcgttacgccgtgggtcgatgtttgatgttatggagcagcaacgatgttacgcagcagggcagtcgccctaaaacaaagttaaacatcatgggggaagcggtgatcgccgaagtatcgactcaactatcagaggtagttggcgtcatcgagcgccatctcgaaccgacgttgctggccgtacatttgtacggctccgcagtggatggcggcctgaagccacacagtgatattgatttgctggttacggtgaccgtaaggcttgatgaaacaacgcggcgagctttgatcaacgaccttttggaaacttcggcttcccctggagagagcgagattctccgcgctgtagaagtcaccattgttgtgcacgacgacatcattccgtggcgttatccagctaagcgcgaactgcaatttggagaatggcagcgcaatgacattcttgcaggtatcttcgagccagccacgatcgacattgatctggctatcttgctgacaaaagcaagagaacatagcgttgccttggtaggtccagcggcggaggaactctttgatccggttcctgaacaggatctatttgaggcgctaaatgaaaccttaacgctatggaactcgccgcccgactgggctggcgatgagcgaaatgtagtgcttacgttgtcccgcatttggtacagcgcagtaaccggcaaaatcgcgccgaaggatgtcgctgccgactgggcaatggagcgcctgccggcccagtatcagcccgtcatacttgaagctagacaggcttatcttggacaagaagaagatcgcttggcctcgcgcgcagatcagttggaagaatttgtccactacgtgaaaggcgagatcaccaaggtagtcggcaaataatgtctagctagaaattcgttcaagccgacgccgcttcgccggcgttaactcaagcgattagatgcactaagcacataattgctcacagccaaactatcaggtcaagtctgcttttattatttttaagcgtgcataataagccctacacaaattgggagatatatcatgcatgaccaaaatcccttaacgtgagttttcgttccactgagcgtcagaccccgtagaaaagatcaaaggatcttcttgagatcctttttttctgcgcgtaatctgctgcttgcaaacaaaaaaaccaccgctaccagcggtggtttgtttgccggatcaagagctaccaactctttttccgaaggtaactggcttcagcagagcgcagataccaaatactgtccttctagtgtagccgtagttaggccaccacttcaagaactctgtagcaccgcctacatacctcgctctgctaatcctgttaccagtggctgctgccagtggcgataagtcgtgtcttaccgggttggactcaagacgatagttaccggataaggcgcagcggtcgggctgaacggggggttcgtgcacacagcccagcttggagcgaacgacctacaccgaactgagatacctacagcgtgagctatgagaaagcgccacgcttcccgaagggagaaaggcggacaggtatccggtaagcggcagggtcggaacaggagagcgcacgagggagcttccagggggaaacgcctggtatctttatagtcctgtcgggtttcgccacctctgacttgagcgtcgatttttgtgatgctcgtcaggggggcggagcctatggaaaaacgccagcaacgcggcctttttacggttcctggccttttgctggccttttgctcacatgttctttcctgcgttatcccctgattctgtggataaccgtattaccgcctttgagtgagctgataccgctcgccgcagccgaacgaccgagcgcagcgagtcagtgagcgaggaagcggaagagcgcctgatgcggtattttctccttacgcatctgtgcggtatttcacaccgcatatggtgcactctcagtacaatctgctctgatgccgcatagttaagccagtatacactccgctatcgctacgtgactgggtcatggctgcgccccgacacccgccaacacccgctgacgcgccctgacgggcttgtctgctcccggcatccgcttacagacaagctgtgaccgtctccgggagctgcatgtgtcagaggttttcaccgtcatcaccgaaacgcgcgaggcagggtgccttgatgtgggcgccggcggtcgagtggcgacggcgcggcttgtccgcgccctggtagattgcctggccgtaggccagccatttttgagcggccagcggccgcgataggccgacgcgaagcggcggggcgtagggagcgcagcgaccgaagggtaggcgctttttgcagctcttcggctgtgcgctggccagacagttatgcacaggccaggcgggttttaagagttttaataagttttaaagagttttaggcggaaaaatcgccttttttctcttttatatcagtcacttacatgtgtgaccggttcccaatgtacggctttgggttcccaatgtacgggttccggttcccaatgtacggctttgggttcccaatgtacgtgctatccacaggaaagagaccttttcgacctttttcccctgctagggcaatttgccctagcatctgctccgtacattaggaaccggcggatgcttcgccctcgatcaggttgcggtagcgcatgactaggatcgggccagcctgccccgcctcctccttcaaatcgtactccggcaggtcatttgacccgatcagcttgcgcacggtgaaacagaacttcttgaactctccggcgctgccactgcgttcgtagatcgtcttgaacaaccatctggcttctgccttgcctgcggcgcggcgtgccaggcggtagagaaaacggccgatgccgggatcgatcaaaaagtaatcggggtgaaccgtcagcacgtccgggttcttgccttctgtgatctcgcggtacatccaatcagctagctcgatctcgatgtactccggccgcccggtttcgctctttacgatcttgtagcggctaatcaaggcttcaccctcggataccgtcaccaggcggccgttcttggccttcttcgtacgctgcatggcaacgtgcgtggtgtttaaccgaatgcaggtttctaccaggtcgtctttctgctttccgccatcggctcgccggcagaacttgagtacgtccgcaacgtgtggacggaacacgcggccgggcttgtctcccttcccttcccggtatcggttcatggattcggttagatgggaaaccgccatcagtaccaggtcgtaatcccacacactggccatgccggccggccctgcggaaacctctacgtgcccgtctggaagctcgtagcggatcacctcgccagctcgtcggtcacgcttcgacagacggaaaacggccacgtccatgatgctgcgactatcgcgggtgcccacgtcatagagcatcggaacgaaaaaatctggttgctcgtcgcccttgggcggcttcctaatcgacggcgcaccggctgccggcggttgccgggattctttgcggattcgatcagcggccgcttgccacgattcaccggggcgtgcttctgcctcgatgcgttgccgctgggcggcctgcgcggccttcaacttctccaccaggtcatcacccagcgccgcgccgatttgtaccgggccggatggtttgcgaccgtcacgccgattcctcgggcttgggggttccagtgccattgcagggccggcagacaacccagccgcttacgcctggccaaccgcccgttcctccacacatggggcattccacggcgtcggtgcctggttgttcttgattttccatgccgcctcctttagccgctaaaattcatctactcatttattcatttgctcatttactctggtagctgcgcgatgtattcagatagcagctcggtaatggtcttgccttggcgtaccgcgtacatcttcagcttggtgtgatcctccgccggcaactgaaagttgacccgcttcatggctggcgtgtctgccaggctggccaacgttgcagccttgctgctgcgtgcgctcggacggccggcacttagcgtgtttgtgcttttgctcattttctctttacctcattaactcaaatgagttttgatttaatttcagcggccagcgcctggacctcgcgggcagcgtcgccctcgggttctgattcaagaacggttgtgccggcggcggcagtgcctgggtagctcacgcgctgcgtgatacgggactcaagaatgggcagctcgtacccggccagcgcctcggcaacctcaccgccgatgcgcgtgcctttgatcgcccgcgacacgacaaaggccgcttgtagccttccatccgtgacctcaatgcgctgcttaaccagctccaccaggtcggcggtggcccatatgtcgtaagggcttggctgcaccggaatcagcacgaagtcggctgccttgatcgcggacacagccaagtccgccgcctggggcgctccgtcgatcactacgaagtcgcgccggccgatggccttcacgtcgcggtcaatcgtcgggcggtcgatgccgacaacggttagcggttgatcttcccgcacggccgcccaatcgcgggcactgccctggggatcggaatcgactaacagaacatcggccccggcgagttgcagggcgcgggctagatgggttgcgatggtcgtcttgcctgacccgcctttctggttaagtacagcgataaccttcatgcgttccccttgcgtatttgtttatttactcatcgcatcatatacgcagcgaccgcatgacgcaagctgttttactcaaatacacatcacctttttagacggcggcgctcggtttcttcagcggccaagctggccggccaggccgccagcttggcatcagacaaaccggccaggatttcatgcagccgcacggttgagacgtgcgcgggcggctcgaacacgtacccggccgcgatcatctccgcctcgatctcttcggtaatgaaaaacggttcgtcctggccgtcctggtgcggtttcatgcttgttcctcttggcgttcattctcggcggccgccagggcgtcggcctcggtcaatgcgtcctcacggaaggcaccgcgccgcctggcctcggtgggcgtcacttcctcgctgcgctcaagtgcgcggtacagggtcgagcgatgcacgccaagcagtgcagccgcctctttcacggtgcggccttcctggtcgatcagctcgcgggcgtgcgcgatctgtgccggggtgagggtagggcgggggccaaacttcacgcctcgggccttggcggcctcgcgcccgctccgggtgcggtcgatgattagggaacgctcgaactcggcaatgccggcgaacacggtcaacaccatgcggccggccggcgtggtggtgtcggcccacggctctgccaggctacgcaggcccgcgccggcctcctggatgcgctcggcaatgtccagtaggtcgcgggtgctgcgggccaggcggtctagcctggtcactgtcacaacgtcgccagggcgtaggtggtcaagcatcctggccagctccgggcggtcgcgcctggtgccggtgatcttctcggaaaacagcttggtgcagccggccgcgtgcagttcggcccgttggttggtcaagtcctggtcgtcggtgctgacgcgggcatagcccagcaggccagcggcggcgctcttgttcatggcgtaatgtctccggttctagtcgcaagtattctactttatgcgactaaaacacgcgacaagaaaacgccaggaaaagggcagggcggcagcctgtcgcgtaacttaggacttgtgcgacatgtcgttttcagaagacggctgcactgaacgtcagaagccgactgcactatagcagcggaggggttggatcaaagtactttgatcccgaggggaaccctgtggttggcatgcacatacaaatggacgaacggataaaccttttcacgcccttttaaatatccgttattctaataaacgctcttttctcttaggtttacccgccaatatatcctgtcaaacactgatagtttaaactgaaggcgggaaacgacaatctgatccaagctcaagctaagcttgggcccgagcggataacaatttcacacaggaaacagctatgaccatgattacgccaagctatcaactttgtatagaaaagttgtaggttaagagtttcgttttccttcgttcaaaatctaatgtgaaggaaagcaaaactgacacaacttttgtgtgaaccagagcaagtgaaagtgtgtcgaatctgtacttttgtactgtgtaatctctatagtctgactctcattatgtagttttaagtgtcttttacttgtgtagctgttacctgttacctgttaggttttctaatccttgttttatttgatagccagatactttagggaattttacttcttcttttcttgggtttaatttaagacatattcgtatatttcatttaattctgttatctgatttgtgagatcatgaaaacgaatgttgaacttgaaacttgagtgggttcagaaaaactactctgtattaaaaatcccagtgtcacatgataatgatccttcagtaaaggtagacatagcttttttgcagtgtgatatgcacaaatacaatctatatttttatgtaaaagatatatttctttgaaagtacttataaaaatatgtttttcataaaaaaaattatatgtaattctgaaagtatgtgatatgcacaagcacaacctatatttcctacattcaaattcgggtttttcttgacgccaagttacattcaattatcaataatagggctagttcaactaatgctatttatttatacaatccacccactactaaatctcaatctccaaggatctttatatattaataagaaaagctactatccaaatgcgaccttgttcgtgaagtgtttggtttataatttggtggcttaagactatagcccaccattgacccaaaaaaagaaaggaaaattaatagtagactatatagctaccaactccctataatttaccttgaaattaaaccagctttgtatttttttaatagaagtcagggctctacagtttcattttaaacttttttttttgttatattacatcctgcaggttagttgtaatttgtaaacgtaatcaacataataaaaccatttacatagactgattaaagttgattccatttgataatatttagctatttatatatcaatcaaccaccagctcttaaatatatgtattcaaattgttttgttgactctttttgctacactttaaatttgaatctagaatgttgtcctgaaacaaaaatctgtggattgaacaaaattatacaccaggtaaaattttgaagtttttaaaagcaggatcacatactcctaattttagattggatagatctagtataaaaatatgaagtttttttcccaaaaaataataataccatttagctcttaattaaatgcatgcaaactaaagataaaaagaggaattattttaaccattctaactcgtcacaacatgcctaatcattccaggttaattttagagttttcaaatcgtcatattaacatgtgatcctgaagactcttctcttctttcttctaccattagctgaaatctttacttgtaccacaattaacctcaaaccctagcccctaaatccccctagaaatcaatccatcctcagttctccaaaaagatatctttggtttttcttcactgacaaaacccctaaaaacaagtttgtacaaaaaagcaggctccatgggaagatcaccttgttgtgataaaaatggagtgaagaagggaccatggactgctgaggaggatcagaaactcatcgattatattcgatttcatggtcctggcaattggcgtacgctccccaaaaatgctggtacgtataaactacacaccgttccttatattttgttctcatagattaatatatatgttctctatttattgagtcacacacttataagtcgtattgtacaaattaaaggactccatagatgtggaaaaagctgccgtcttcgatggaccaattatctaagaccggacatcaagagaggaagattctcgttcgaggaagaagaaactatcattcagctacacagtgttatgggaaacaagtaagcctgatcattcacaccataatttttgtctgaaattcatattcatcagctacatgcttttgtatgttaattaatgtaaaactcaaaaagggagagtgtacgtttgcatgcgggggtacatgtcaaatgtaggccatcaactccaataaactattattagtactttactagtacgtattgacctatattagaataataataaaggagttttgtattgatcatagattaatgtcactaatattgaattgatgaatattaggtggtcagcaatagccgctcgtctaccagggaggaccgataacgaaataaaaaaccattggaacactcacatccgcaagagacttgtaaggagtggtatcgaccctgttactcattctccacgccttgatcttcttgatttgtcctcacttttgagtgcacttttcaaccagccaaacttttcagcagttgcaacacatgcgtcttctcttcttaatcctgatgtattgaggttggcctctctactactgccacttcaaaaccctaatccagtttacccatcgaacctcgaccaaaatcttcaaactccaaatacatcatcagaatcgtctcaaccacaagctgagactagtacagtcccaacaaactatgaaacttcatcattggagcctatgaacgcaagactcgacgacgttggtcttgcagatgtattaccacctttgtcagagagttttgacttagactcgctcatgtcaacgccaatgtcttctccacgacaaaatagcattgaagcagaaaccaactccagcactttcttcgactttggaattccggaagatttcatcttagatgactttatgtttgacccagctttcttgtacaaagtggcctaattttcaacatttgcatacacatgtcttgctttcacacatatgattctttgttgcattctttcttttgtttgatgtataaatttcttgtttttattctctcaaaagatattaagttattagtctataaaattttcatgaatgtttatgtattatctgcttaggcgagatatctaaattctgctccattagtccatatacacagttgacggaagcaaacatagaattattagcgtcaaacacatcacatattcatattgctttgttcgaatcatcgtcaatcaagttaatcagtttatgcgagttctatcatttaggcccaattcaaggcccaattcaagttcattttaaagccgttaatttggccagcaactttattatacatagttgataattcactggccgtcgttttacaacgtcgtgactgggaaaacgatctaactgactagccgcggccatggcggccgggagcggccatgctagagtccgcaaaaatcaccagtctctctctacaaatctatctctctctatttttctccagaataatgtgtgagtagttcccagataagggaattagggttcttatagggtttcgctcatgtgttgagcatataagaaacccttagtatgtatttgtatttgtaaaatacttctatcaataaaatttctaattcctaaaaccaaaatccagtgacctgcaggtcgaccatatgggag

SEQ ID NO: 8 - DNA, 12006 bp, synthetic construct
  misc_feature 1..12006: note = proHORST::MYB41 construct
  source 1..12006: mol_type = other DNA
agctcgaattatcatacatgagaattaagggagtcacgttatgacccccgccgatgacgcgggacaagccgttttacgtttggaactgacagaaccgcaacgttgaaggagccactgagccgcgggtttctggagtttaatgagctaagcacatacgtcagaaaccattattgcgcgttcaaaagtcgcctaaggtcactatcagctagcaaatatttcttgtcaaaaatgctccactgacgttccataaattcccctcggtatccaattagagtctcatattcactctcaactcgatcgaggggatctaccatgagcccagaacgacgcccggccgacatccgccgtgccaccgaggcggacatgccggcggtctgcaccatcgtcaaccactacatcgagacaagcacggtcaacttccgtaccgagccgcaggaaccgcaggagtggacggacgacctcgtccgtctgcgggagcgctatccctggctcgtcgccgaggtggacggcgaggtcgccggcatcgcctacgcgggtccctggaaggcacgcaacgcctacgactggacggccgagtcgaccgtgtacgtctccccccgccaccagcggacgggactgggctccacgctctacacccacctgctgaagtccctggaggcacagggcttcaagagcgtggtcgctgtcatcgggctgcccaacgacccgagcgtgcgcatgcacgaggcgctcggatatgccccccgcggcatgctgcgggcggccggcttcaagcacgggaactggcatgacgtgggtttctggcagctggacttcagcctgccggtgccgccccgtccggtcctgcccgtcaccgaaatctgatgacccctagagtcaagcagatcgttcaaacatttggcaataaagtttcttaagattgaatcctgttgccggtcttgcgatgattatcatataatttctgttgaattacgttaagcatgtaataattaacatgtaatgcatgacgttatttatgagatgggtttttatgattagagtcccgcaattatacatttaatacgcgatagaaaacaaaatatagcgcgcaaactaggataaattatcgcgcgcggtgtcatctatatgttactagatcgaccggcatgcaagctgataattcaattcggcgttaattcagtacattaaaaacgtccgcaatgtgttattaagttgtctaagcgtcaatttgtttacaccacaatatatcctgccaccagccagccaacagctccccgaccggcagctcggcacaaaatcaccactcgatacaggcagcccatcagtccgggacggcgtcagcgggagagccgttgtaaggcggcagactttgctcatgttaccgatgctattcggaagaacggcaactaagctgccgggtttgaaacacggatgatctcgcggagggtagcatgttgattgtaacgatgacagagcgttgctgcctgtgatcaattcgggcacgaacccagtggacataagcctcgttcggttcgtaagctgtaatgcaagtagcgtaactgccgtcacgcaactggtccagaaccttgaccgaacgcagcggtggtaacggcgcagtggcggttttcatggcttcttgttatgacatgtttttttggggtacagtctatgcctcgggcatccaagcagcaagcgcgttacgccgtgggtcgatgtttgatgttatggagcagcaacgatgttacgcagcagggcagtcgccctaaaacaaagttaaacatcatgggggaagcggtgatcgccgaagtatcgactcaactatcagaggtagttggcgtcatcgagcgccatctcgaaccgacgttgctggccgtacatttgtacggctccgcagtggatggcggcctgaagccacacagtgatattgatttgctggttacggtgaccgtaaggcttgatgaaacaacgcggcgagctttgatcaacgaccttttggaaacttcggcttcccctggagagagcgagattctccgcgctgtagaagtcaccattgttgtgcacgacgacatcattccgtggcgttatccagctaagcgcgaactgcaatttggagaatggcagcgcaatgacattcttgcaggtatcttcgagccagccacgatcgacattgatctggctatcttgctgacaaaagcaagagaacatagcgttgccttggtaggtccagcggcggaggaactctttgatccggttcctgaacaggatctatttgaggcgctaaatgaaaccttaacgctatggaactcgccgcccgactgggctggcgatgagcgaaatgtagtgcttacgttgtcccgcatttggtacagcgcagtaaccggcaaaatcgcgccgaaggatgtcgctgccgactgggcaatggagcgcctgccggcccagtatcagcccgtcatacttgaagctagacaggcttatcttggacaagaagaagatcgcttggcctcgcgcgcagatcagttggaagaatttgtccactacgtgaaaggcgagatcaccaaggtagtcggcaaataatgtctagctagaaattcgttcaagccgacgccgcttcgccggcgttaactcaagcgattagatgcactaagcacataattgctcacagccaaactatcaggtcaagtctgcttttattatttttaagcgtgcataataagccctacacaaattgggagatatatcatgcatgaccaaaatcccttaacgtgagttttcgttccactgagcgtcagaccccgtagaaaagatcaaaggatcttcttgagatcctttttttctgcgcgtaatctgctgcttgcaaacaaaaaaaccaccgctaccagcggtggtttgtttgccggatcaagagctaccaactctttttccgaaggtaactggcttcagcagagcgcagataccaaatactgtccttctagtgtagccgtagttaggccaccacttcaagaactctgtagcaccgcctacatacctcgctctgctaatcctgttaccagtggctgctgccagtggcgataagtcgtgtcttaccgggttggactcaagacgatagttaccggataaggcgcagcggtcgggctgaacggggggttcgtgcacacagcccagcttggagcgaacgacctacaccgaactgagatacctacagcgtgagctatgagaaagcgccacgcttcccgaagggagaaaggcggacaggtatccggtaagcggcagggtcggaacaggagagcgcacgagggagcttccagggggaaacgcctggtatctttatagtcctgtcgggtttcgccacctctgacttgagcgtcgatttttgtgatgctcgtcaggggggcggagcctatggaaaaacgccagcaacgcggcctttttacggttcctggccttttgctggccttttgctcacatgttctttcctgcgttatcccctgattctgtggataaccgtattaccgcctttgagtgagctgataccgctcgccgcagccgaacgaccgagcgcagcgagtcagtgagcgaggaagcggaagagcgcctgatgcggtattttctccttacgcatctgtgcggtatttcacaccgcatatggtgcactctcagtacaatctgctctgatgccgcatagttaagccagtatacactccgctatcgctacgtgactgggtcatggctgcgccccgacacccgccaacacccgctgacgcgccctgacgggcttgtctgctcccggcatccgcttacagacaagctgtgaccgtctccgggagctgcatgtgtcagaggttttcaccgtcatcaccgaaacgcgcgaggcagggtgccttgatgtgggcgccggcggtcgagtggcgacggcgcggcttgtccgcgccctggtagattgcctggccgtaggccagccatttttgagcggccagcggccgcgataggccgacgcgaagcggcggggcgtagggagcgcagcgaccgaagggtaggcgctttttgcagctcttcggctgtgcgctggccagacagttatgcacaggccaggcgggttttaagagttttaataagttttaaagagttttaggcggaaaaatcgccttttttctcttttatatcagtcacttacatgtgtgaccggttcccaatgtacggctttgggttcccaatgtacgggttccggttcccaatgtacggctttgggttcccaatgtacgtgctatccacaggaaagagaccttttcgacctttttcccctgctagggcaatttgccctagcatctgctccgtacattaggaaccggcggatgcttcgccctcgatcaggttgcggtagcgcatgactaggatcgggccagcctgccccgcctcctccttcaaatcgtactccggcaggtcatttgacccgatcagcttgcgcacggtgaaacagaacttcttgaactctccggcgctgccactgcgttcgtagatcgtcttgaacaaccatctggcttctgccttgcctgcggcgcggcgtgccaggcggtagagaaaacggccgatgccgggatcgatcaaaaagtaatcggggtgaaccgtcagcacgtccgggttcttgccttctgtgatctcgcggtacatccaatcagctagctcgatctcgatgtactccggccgcccggtttcgctctttacgatcttgtagcggctaatcaaggcttcaccctcggataccgtcaccaggcggccgttcttggccttcttcgtacgctgcatggcaacgtgcgtggtgtttaaccgaatgcaggtttctaccaggtcgtctttctgctttccgccatcggctcgccggcagaacttgagtacgtccgcaacgtgtggacggaacacgcggccgggcttgtctcccttcccttcccggtatcggttcatggattcggttagatgggaaaccgccatcagtaccaggtcgtaatcccacacactggccatgccggccggccctgcggaaacctctacgtgcccgtctggaagctcgtagcggatcacctcgccagctcgtcggtcacgcttcgacagacggaaaacggccacgtccatgatgctgcgactatcgcgggtgcccacgtcatagagcatcggaacgaaaaaatctggttgctcgtcgcccttgggcggcttcctaatcgacggcgcaccggctgccggcggttgccgggattctttgcggattcgatcagcggccgcttgccacgattcaccggggcgtgcttctgcctcgatgcgttgccgctgggcggcctgcgcggccttcaacttctccaccaggtcatcacccagcgccgcgccgatttgtaccgggccggatggtttgcgaccgtcacgccgattcctcgggcttgggggttccagtgccattgcagggccggcagacaacccagccgcttacgcctggccaaccgcccgttcctccacacatggggcattccacggcgtcggtgcctggttgttcttgattttccatgccgcctcctttagccgctaaaattcatctactcatttattcatttgctcatttactctggtagctgcgcgatgtattcagatagcagctcggtaatggtcttgccttggcgtaccgcgtacatcttcagcttggtgtgatcctccgccggcaactgaaagttgacccgcttcatggctggcgtgtctgccaggctggccaacgttgcagccttgctgctgcgtgcgctcggacggccggcacttagcgtgtttgtgcttttgctcattttctctttacctcattaactcaaatgagttttgatttaatttcagcggccagcgcctggacctcgcgggcagcgtcgccctcgggttctgattcaagaacggttgtgccggcggcggcagtgcctgggtagctcacgcgctgcgtgatacgggactcaagaatgggcagctcgtacccggccagcgcctcggcaacctcaccgccgatgcgcgtgcctttgatcgcccgcgacacgacaaaggccgcttgtagccttccatccgtgacctcaatgcgctgcttaaccagctccaccaggtcggcggtggcccatatgtcgtaagggcttggctgcaccggaatcagcacgaagtcggctgccttgatcgcggacacagccaagtccgccgcctggggcgctccgtcgatcactacgaagtcgcgccggccgatggccttcacgtcgcggtcaatcgtcgggcggtcgatgccgacaacggttagcggttgatcttcccgcacggccgcccaatcgcgggcactgccctggggatcggaatcgactaacagaacatcggccccggcgagttgcagggcgcgggctagatgggttgcgatggtcgtcttgcctgacccgcctttctggttaagtacagcgataaccttcatgcgttccccttgcgtatttgtttatttactcatcgcatcatatacgcagcgaccgcatgacgcaagctgttttactcaaatacacatcacctttttagacggcggcgctcggtttcttcagcggccaagctggccggccaggccgccagcttggcatcagacaaaccggccaggatttcatgcagccgcacggttgagacgtgcgcgggcggctcgaacacgtacccggccgcgatcatctccgcctcgatctcttcggtaatgaaaaacggttcgtcctggccgtcctggtgcggtttcatgcttgttcctcttggcgttcattctcggcggccgccagggcgtcggcctcggtcaatgcgtcctcacggaaggcaccgcgccgcctggcctcggtgggcgtcacttcctcgctgcgctcaagtgcgcggtacagggtcgagcgatgcacgccaagcagtgcagccgcctctttcacggtgcggccttcctggtcgatcagctcgcgggcgtgcgcgatctgtgccggggtgagggtagggcgggggccaaacttcacgcctcgggccttggcggcctcgcgcccgctccgggtgcggtcgatgattagggaacgctcgaactcggcaatgccggcgaacacggtcaacaccatgcggccggccggcgtggtggtgtcggcccacggctctgccaggctacgcaggcccgcgccggcctcctggatgcgctcggcaatgtccagtaggtcgcgggtgctgcgggccaggcggtctagcctggtcactgtcacaacgtcgccagggcgtaggtggtcaagcatcctggccagctccgggcggtcgcgcctggtgccggtgatcttctcggaaaacagcttggtgcagccggccgcgtgcagttcggcccgttggttggtcaagtcctggtcgtcggtgctgacgcgggcatagcccagcaggccagcggcggcgctcttgttcatggcgtaatgtctccggttctagtcgcaagtattctactttatgcgactaaaacacgcgacaagaaaacgccaggaaaagggcagggcggcagcctgtcgcgtaacttaggacttgtgcgacatgtcgttttcagaagacggctgcactgaacgtcagaagccgactgcactatagcagcggaggggttggatcaaagtactttgatcccgaggggaaccctgtggttggcatgcacatacaaatggacgaacggataaaccttttcacgcccttttaaatatccgttattctaataaacgctcttttctcttaggtttacccgccaatatatcctgtcaaacactgatagtttaaactgaaggcgggaaacgacaatctgatccaagctcaagctaagcttgggcccgagcggataacaatttcacacaggaaacagctatgaccatgattacgccaagctatcaactttgtatagaaaagttgcccatctacaaagcctataaaatggaaagatgtatgcatcgatgatgattctgcctcacttagaagaatcaaaaagctaaaaggagctgcgaatcctgggcaacgatgacttagtatgtatagaagaaaaaaaaagcttttacttggtatcaaacagagcatgtgttgttgtatttgctacctttttctgcaaagttattggcaattgtattgttgttccacttgtatatatacagagaccatttatgttaatatacaacttcgtatggggaaagatgattccatcaagtccaaaatgccaaaaccatgcacgatcttgtctgatcaagtatgataagatgtgagattttaagaacgtgaagcttttcatattgtattctcaatgaacgaagaattaataattagagttagaaatgcagattacagagattacacaatttgatctcatttcttggcaaagaggcccaggccaccgaagccaccgtccttctttggattcctgtgtgttaattttcgtgtggctttagttacaaagggattatattgtcagcgaatctgagccgttggatcgttttgacatgagctttccataagtgtcttatcctttgtttctctcatttttcacatatgtatcagacatttaatcaagcacatatctacgtgttgattatgttgatgatgctgagattatgttgatttagagaatgagtattggtgatgatggtacacgttagtaaacatatgaatttggaagtgccacgtgagagggagcagagttttgggctttcttttggttatgtatttgcattcttgttgtaacaaattctcttattaaaagcattgtgaaaaaaaccaaataccacatagtctatgtttcaagatttgttttttaatactataattttctattactttagtttgtgtaatttttgaaaagagaaaattggtattttttaggattgggtgatctgaaatttgactacaaaaattttcttggacacagacacacagtcacacaaataagctaattattggaattttatcttaagttgcattcactttgcaaattaatattgaattatagactattagtgtatggcgtgatggcaaacaaaaaaatcagtgtgtgatattgtggactagccaaaaaaattttctgatgatttttttgcctaaataatttgaattgttgagaccgaaactcttactaatatactaacaatgtaacgcgacaaataaaacattgttgagaataaaatctgaaccatcataactatagtctatagtaaccgtccgaattcaaccacatatgtatgatctttgccatttttgatcatattttccgttgcgttttctttgaattttctcaatatatttttagtgttttgatttgtacttttatctaatttatataattgtttttcaaatgtttcgcaattgtgcgtttaagtattcgactcgaagtaaacccagtttcttagaatgggctaactgccattgaccaaatctttatccgcgaagaaagatctttagcagctaggcttatttcatatcaacaaaagtatatatttatctctaactaaattcctacaattatttcaaaaacatagaaattaaaatttgaaatgcctattcttttttggttatacattgcaaaggttatgtatgtaatttctgatcttgaaatttaagttctttagcccatatctagttgattttcacgaaatattgtcgtttactctcgtttttatatataaagcatgtacatataacatataatcaatgcttcaaaagaaaaaaataatcataactaaattgaaacgggaaaactaatttgctttcgtgttctattatgccaaactgtactcacaatagtcttatcctatcgacccaaatttaatcttcccaactacttactcctaattgaaacaaaatataacctttcttactatagcctatatttaaaaaatatctatgatttctacatttatatatatacgcacacggcacatacctctcattcaccatatatgcctcttaacaatctctccacagaacaaaagcaaaaagcctaaaccgggatagcaagtttgtacaaaaaagcaggctccatgggaagatcaccttgttgtgataaaaatggagtgaagaagggaccatggactgctgaggaggatcagaaactcatcgattatattcgatttcatggtcctggcaattggcgtacgctccccaaaaatgctggtacgtataaactacacaccgttccttatattttgttctcatagattaatatatatgttctctatttattgagtcacacacttataagtcgtattgtacaaattaaaggactccatagatgtggaaaaagctgccgtcttcgatggaccaattatctaagaccggacatcaagagaggaagattctcgttcgaggaagaagaaactatcattcagctacacagtgttatgggaaacaagtaagcctgatcattcacaccataatttttgtctgaaattcatattcatcagctacatgcttttgtatgttaattaatgtaaaactcaaaaagggagagtgtacgtttgcatgcgggggtacatgtcaaatgtaggccatcaactccaataaactattattagtactttactagtacgtattgacctatattagaataataataaaggagttttgtattgatcatagattaatgtcactaatattgaattgatgaatattaggtggtcagcaatagccgctcgtctaccagggaggaccgataacgaaataaaaaaccattggaacactcacatccgcaagagacttgtaaggagtggtatcgaccctgttactcattctccacgccttgatcttcttgatttgtcctcacttttgagtgcacttttcaaccagccaaacttttcagcagttgcaacacatgcgtcttctcttcttaatcctgatgtattgaggttggcctctctactactgccacttcaaaaccctaatccagtttacccatcgaacctcgaccaaaatcttcaaactccaaatacatcatcagaatcgtctcaaccacaagctgagactagtacagtcccaacaaactatgaaacttcatcattggagcctatgaacgcaagactcgacgacgttggtcttgcagatgtattaccacctttgtcagagagttttgacttagactcgctcatgtcaacgccaatgtcttctccacgacaaaatagcattgaagcagaaaccaactccagcactttcttcgactttggaattccggaagatttcatcttagatgactttatgtttgacccagctttcttgtacaaagtggcctaattttcaacatttgcatacacatgtcttgctttcacacatatgattctttgttgcattctttcttttgtttgatgtataaatttcttgtttttattctctcaaaagatattaagttattagtctataaaattttcatgaatgtttatgtattatctgcttaggcgagatatctaaattctgctccattagtccatatacacagttgacggaagcaaacatagaattattagcgtcaaacacatcacatattcatattgctttgttcgaatcatcgtcaatcaagttaatcagtttatgcgagttctatcatttaggcccaattcaaggcccaattcaagttcattttaaagccgttaatttggccagcaactttattatacatagttgataattcactggccgtcgttttacaacgtcgtgactgggaaaacgatctaactgactagccgcggccatggcggccgggagcggccatgctagagtccgcaaaaatcaccagtctctctctacaaatctatctctctctatttttctccagaataatgtgtgagtagttcccagataagggaattagggttcttatagggtttcgctcatgtgttgagcatataagaaacccttagtatgtatttgtatttgtaaaatacttctatcaataaaatttctaattcctaaaaccaaaatccagtgacctgcaggtcgaccatatgggag

SEQ ID NO: 9 - DNA, 11934 bp, synthetic construct
  misc_feature 1..11934: note = proASFT::MYB41 construct
  source 1..11934: mol_type = other DNA
agctcgaattatcatacatgagaattaagggagtcacgttatgacccccgccgatgacgcgggacaagccgttttacgtttggaactgacagaaccgcaacgttgaaggagccactgagccgcgggtttctggagtttaatgagctaagcacatacgtcagaaaccattattgcgcgttcaaaagtcgcctaaggtcactatcagctagcaaatatttcttgtcaaaaatgctccactgacgttccataaattcccctcggtatccaattagagtctcatattcactctcaactcgatcgaggggatctaccatgagcccagaacgacgcccggccgacatccgccgtgccaccgaggcggacatgccggcggtctgcaccatcgtcaaccactacatcgagacaagcacggtcaacttccgtaccgagccgcaggaaccgcaggagtggacggacgacctcgtccgtctgcgggagcgctatccctggctcgtcgccgaggtggacggcgaggtcgccggcatcgcctacgcgggtccctggaaggcacgcaacgcctacgactggacggccgagtcgaccgtgtacgtctccccccgccaccagcggacgggactgggctccacgctctacacccacctgctgaagtccctggaggcacagggcttcaagagcgtggtcgctgtcatcgggctgcccaacgacccgagcgtgcgcatgcacgaggcgctcggatatgccccccgcggcatgctgcgggcggccggcttcaagcacgggaactggcatgacgtgggtttctggcagctggacttcagcctgccggtgccgccccgtccggtcctgcccgtcaccgaaatctgatgacccctagagtcaagcagatcgttcaaacatttggcaataaagtttcttaagattgaatcctgttgccggtcttgcgatgattatcatataatttctgttgaattacgttaagcatgtaataattaacatgtaatgcatgacgttatttatgagatgggtttttatgattagagtcccgcaattatacatttaatacgcgatagaaaacaaaatatagcgcgcaaactaggataaattatcgcgcgcggtgtcatctatatgttactagatcgaccggcatgcaagctgataattcaattcggcgttaattcagtacattaaaaacgtccgcaatgtgttattaagttgtctaagcgtcaatttgtttacaccacaatatatcctgccaccagccagccaacagctccccgaccggcagctcggcacaaaatcaccactcgatacaggcagcccatcagtccgggacggcgtcagcgggagagccgttgtaaggcggcagactttgctcatgttaccgatgctattcggaagaacggcaactaagctgccgggtttgaaacacggatgatctcgcggagggtagcatgttgattgtaacgatgacagagcgttgctgcctgtgatcaattcgggcacgaacccagtggacataagcctcgttcggttcgtaagctgtaatgcaagtagcgtaactgccgtcacgcaactggtccagaaccttgaccgaacgcagcggtggtaacggcgcagtggcggttttcatggcttcttgttatgacatgtttttttggggtacagtctatgcctcgggcatccaagcagcaagcgcgttacgccgtgggtcgatgtttgatgttatggagcagcaacgatgttacgcagcagggcagtcgccctaaaacaaagttaaacatcatgggggaagcggtgatcgccgaagtatcgactcaactatcagaggtagttggcgtcatcgagcgccatctcgaaccgacgttgctggccgtacatttgtacggctccgcagtggatggcggcctgaagccacacagtgatattgatttgctggttacggtgaccgtaaggcttgatgaaacaacgcggcgagctttgatcaacgaccttttggaaacttcggcttcccctggagagagcgagattctccgcgctgtagaagtcaccattgttgtgcacgacgacatcattccgtggcgttatccagctaagcgcgaactgcaatttggagaatggcagcgcaatgacattcttgcaggtatcttcgagccagccacgatcgacattgatctggctatcttgctgacaaaagcaagagaacatagcgttgccttggtaggtccagcggcggaggaactctttgatccggttcctgaacaggatctatttgaggcgctaaatgaaaccttaacgctatggaactcgccgcccgactgggctggcgatgagcgaaatgtagtgcttacgttgtcccgcatttggtacagcgcagtaaccggcaaaatcgcgccgaaggatgtcgctgccgactgggcaatggagcgcctgccggcccagtatcagcccgtcatacttgaagctagacaggcttatcttggacaagaagaagatcgcttggcctcgcgcgcagatcagttggaagaatttgtccactacgtgaaaggcgagatcaccaaggtagtcggcaaataatgtctagctagaaattcgttcaagccgacgccgcttcgccggcgttaactcaagcgattagatgcactaagcacataattgctcacagccaaactatcaggtcaagtctgcttttattatttttaagcgtgcataataagccctacacaaattgggagatatatcatgcatgaccaaaatcccttaacgtgagttttcgttccactgagcgtcagaccccgtagaaaagatcaaaggatcttcttgagatcctttttttctgcgcgtaatctgctgcttgcaaacaaaaaaaccaccgctaccagcggtggtttgtttgccggatcaagagctaccaactctttttccgaaggtaactggcttcagcagagcgcagataccaaatactgtccttctagtgtagccgtagttaggccaccacttcaagaactctgtagcaccgcctacatacctcgctctgctaatcctgttaccagtggctgctgccagtggcgataagtcgtgtcttaccgggttggactcaagacgatagttaccggataaggcgcagcggtcgggctgaacggggggttcgtgcacacagcccagcttggagcgaacgacctacaccgaactgagatacctacagcgtgagctatgagaaagcgccacgcttcccgaagggagaaaggcggacaggtatccggtaagcggcagggtcggaacaggagagcgcacgagggagcttccagggggaaacgcctggtatctttatagtcctgtcgggtttcgccacctctgacttgagcgtcgatttttgtgatgctcgtcaggggggcggagcctatggaaaaacgccagcaacgcggcctttttacggttcctggccttttgctggccttttgctcacatgttctttcctgcgttatcccctgattctgtggataaccgtattaccgcctttgagtgagctgataccgctcgccgcagccgaacgaccgagcgcagcgagtcagtgagcgaggaagcggaagagcgcctgatgcggtattttctccttacgcatctgtgcggtatttcacaccgcatatggtgcactctcagtacaatctgctctgatgccgcatagttaagccagtatacactccgctatcgctacgtgactgggtcatggctgcgccccgacacccgccaacacccgctgacgcgccctgacgggcttgtctgctcccggcatccgcttacagacaagctgtgaccgtctccgggagctgcatgtgtcagaggttttcaccgtcatcaccgaaacgcgcgaggcagggtgccttgatgtgggcgccggcggtcgagtggcgacggcgcggcttgtccgcgccctggtagattgcctggccgtaggccagccatttttgagcggccagcggccgcgataggccgacgcgaagcggcggggcgtagggagcgcagcgaccgaagggtaggcgctttttgcagctcttcggctgtgcgctggccagacagttatgcacaggccaggcgggttttaagagttttaataagttttaaagagttttaggcggaaaaatcgccttttttctcttttatatcagtcacttacatgtgtgaccggttcccaatgtacggctttgggttcccaatgtacgggttccggttcccaatgtacggctttgggttcccaatgtacgtgctatccacaggaaagagaccttttcgacctttttcccctgctagggcaatttgccctagcatctgctccgtacattaggaaccggcggatgcttcgccctcgatcaggttgcggtagcgcatgactaggatcgggccagcctgccccgcctcctccttcaaatcgtactccggcaggtcatttgacccgatcagcttgcgcacggtgaaacagaacttcttgaactctccggcgctgccactgcgttcgtagatcgtcttgaacaaccatctggcttctgccttgcctgcggcgcggcgtgccaggcggtagagaaaacggccgatgccgggatcgatcaaaaagtaatcggggtgaaccgtcagcacgtccgggttcttgccttctgtgatctcgcggtacatccaatcagctagctcgatctcgatgtactccggccgcccggtttcgctctttacgatcttgtagcggctaatcaaggcttcaccctcggataccgtcaccaggcggccgttcttggccttcttcgtacgctgcatggcaacgtgcgtggtgtttaaccgaatgcaggtttctaccaggtcgtctttctgctttccgccatcggctcgccggcagaacttgagtacgtccgcaacgtgtggacggaacacgcggccgggcttgtctcccttcccttcccggtatcggttcatggattcggttagatgggaaaccgccatcagtaccaggtcgtaatcccacacactggccatgccggccggccctgcggaaacctctacgtgcccgtctggaagctcgtagcggatcacctcgccagctcgtcggtcacgcttcgacagacggaaaacggccacgtccatgatgctgcgactatcgcgggtgcccacgtcatagagcatcggaacgaaaaaatctggttgctcgtcgcccttgggcggcttcctaatcgacggcgcaccggctgccggcggttgccgggattctttgcggattcgatcagcggccgcttgccacgattcaccggggcgtgcttctgcctcgatgcgttgccgctgggcggcctgcgcggccttcaacttctccaccaggtcatcacccagcgccgcgccgatttgtaccgggccggatggtttgcgaccgtcacgccgattcctcgggcttgggggttccagtgccattgcagggccggcagacaacccagccgcttacgcctggccaaccgcccgttcctccacacatggggcattccacggcgtcggtgcctggttgttcttgattttccatgccgcctcctttagccgctaaaattcatctactcatttattcatttgctcatttactctggtagctgcgcgatgtattcagatagcagctcggtaatggtcttgccttggcgtaccgcgtacatcttcagcttggtgtgatcctccgccggcaactgaaagttgacccgcttcatggctggcgtgtctgccaggctggccaacgttgcagccttgctgctgcgtgcgctcggacggccggcacttagcgtgtttgtgcttttgctcattttctctttacctcattaactcaaatgagttttgatttaatttcagcggccagcgcctggacctcgcgggcagcgtcgccctcgggttctgattcaagaacggttgtgccggcggcggcagtgcctgggtagctcacgcgctgcgtgatacgggactcaagaatgggcagctcgtacccggccagcgcctcggcaacctcaccgccgatgcgcgtgcctttgatcgcccgcgacacgacaaaggccgcttgtagccttccatccgtgacctcaatgcgctgcttaaccagctccaccaggtcggcggtggcccatatgtcgtaagggcttggctgcaccggaatcagcacgaagtcggctgccttgatcgcggacacagccaagtccgccgcctggggcgctccgtcgatcactacgaagtcgcgccggccgatggccttcacgtcgcggtcaatcgtcgggcggtcgatgccgacaacggttagcggttgatcttcccgcacggccgcccaatcgcgggcactgccctggggatcggaatcgactaacagaacatcggccccggcgagttgcagggcgcgggctagatgggttgcgatggtcgtcttgcctgacccgcctttctggttaagtacagcgataaccttcatgcgttccccttgcgtatttgtttatttactcatcgcatcatatacgcagcgaccgcatgacgcaagctgttttactcaaatacacatcacctttttagacggcggcgctcggtttcttcagcggccaagctggccggccaggccgccagcttggcatcagacaaaccggccaggatttcatgcagccgcacggttgagacgtgcgcgggcggctcgaacacgtacccggccgcgatcatctccgcctcgatctcttcggtaatgaaaaacggttcgtcctggccgtcctggtgcggtttcatgcttgttcctcttggcgttcattctcggcggccgccagggcgtcggcctcggtcaatgcgtcctcacggaaggcaccgcgccgcctggcctcggtgggcgtcacttcctcgctgcgctcaagtgcgcggtacagggtcgagcgatgcacgccaagcagtgcagccgcctctttcacggtgcggccttcctggtcgatcagctcgcgggcgtgcgcgatctgtgccggggtgagggtagggcgggggccaaacttcacgcctcgggccttggcggcctcgcgcccgctccgggtgcggtcgatgattagggaacgctcgaactcggcaatgccggcgaacacggtcaacaccatgcggccggccggcgtggtggtgtcggcccacggctctgccaggctacgcaggcccgcgccggcctcctggatgcgctcggcaatgtccagtaggtcgcgggtgctgcgggccaggcggtctagcctggtcactgtcacaacgtcgccagggcgtaggtggtcaagcatcctggccagctccgggcggtcgcgcctggtgccggtgatcttctcggaaaacagcttggtgcagccggccgcgtgcagttcggcccgttggttggtcaagtcctggtcgtcggtgctgacgcgggcatagcccagcaggccagcggcggcgctcttgttcatggcgtaatgtctccggttctagtcgcaagtattctactttatgcgactaaaacacgcgacaagaaaacgccaggaaaagggcagggcggcagcctgtcgcgtaacttaggacttgtgcgacatgtcgttttcagaagacggctgcactgaacgtcagaagccgactgcactatagcagcggaggggttggatcaaagtactttgatcccgaggggaaccctgtggttggcatgcacatacaaatggacgaacggataaaccttttcacgcccttttaaatatccgttattctaataaacgctcttttctcttaggtttacccgccaatatatcctgtcaaacactgatagtttaaactgaaggcgggaaacgacaatctgatccaagctcaagctaagcttgggcccgagcggataacaatttcacacaggaaacagctatgaccatgattacgccaagctatcaactttgtatagaaaagttgccagctcaaacctttaaatggcttttaattagatatatttagcgagaatgtgattgctagtgaaatctcaaacttgatagcttattcatagcttattttacttcgatcagcaagagaacaatggttcctaaagctcaaaccttttttggcgtttgctttagattgtgcatacataaagtgagaagatgaaatatggttttgctgaaatctcaatgtgctcattcatagtttattttgctcgacctttctttaatcaatagctttgatgtactgattactttataaagttaagaagtaagttctgctctttaaactgtactgaatggaggcttctctgcataattaagcaaacactctgatgattgagtttcgttgtacaaaggaaagtttttgccttagttagaaattcatcttgtttctttgcccagaagctggcttgctgatagaatttggactacgctacgttttcttgggtgaaaaacaatccgcgtccttccacgagaacagtgaaactgtacgatgttcttattgtattgtgtcaacagcccataatcaatgaaatgggcctcaatgacagtataagccgaaaaatattcgaatgcgatctagaactaatctgaaaccaaacttctcaaatcattaacatttgattagggcctaaaagtccatccgtattttaaaaaaaagttgataacaaatgcaaaaatacaaatatacattactattaaaactcaatctttctgattatatgtggatggagaagctgttttgcagtgtggatttgaattttgaagttcttgttcaaaaaagaaaagaaacttggtcaagcttcaaaagaaagaaagaaataaagacaagtatacaaatacgttgacttcaattaatatgaagatagaagagaaagatatagaaatgcgttttaaattggcggtgggagatatgtgattcccttggtcccgctttctcgtttgattcggtaacctaaaccttctccatccaagaagacacaaacaaggaagaaattaacctacgtacgtacatcatttgaactacttatatctattataaatggaaaatctattttcttcttctctctcttttaaccgaaaaaggaaaagtcctcgaaataactctttaatataattcatgtggaaaccttctatatattttttgcatgcttttttgaaattaagtaatggcatactaattagaagaagacgaaaaataatatgtctaagtaattgagtttcgtggtcaaggcaaatcaagattgcattctttaattaagtgtacaaattatgatgtaagaaccgttatttggcataacctaatatatattaaaaactgattttttttttttttaacttctgtaagaaatggttttcttaattaccaatcatgatctattattgtaaaatgtgtaattttgtgttgcgattgaagtgttcttagataaagatatgtcatatgcatgatatcatctatttgattttgagaaaataaaaacataacatgagaacatcgtagagagtaagatacatgacaaagagaaagaataagctaagaagtcatccaaaaattgggaggcctactctcaactaccaaaaatacaagtgtttgttgtgttaggtcatttattcagtcacctaaccctaactatatgaaatacgttaaaattcatatatagaaaaataaagaagaaatactattagtcaatataattttttttaacaaaataaaaataaagaaagaaacactattagtcaatgaattaaaaaaaaaaaaatccatctttcgatcaagaccgtccaagtattctcctttcacataactcttacgttttacactaaacaagacgagatttttatgagcttgtggctcccacaacaatcctcattgatttctccatatatatcacatgagaatccaactcgacttcatactaacattcatcccaaaagttccattctttttcacaaagccattgtgctgttttctccatttggatcaaagcaagtttgtacaaaaaagcaggctccatgggaagatcaccttgttgtgataaaaatggagtgaagaagggaccatggactgctgaggaggatcagaaactcatcgattatattcgatttcatggtcctggcaattggcgtacgctccccaaaaatgctggtacgtataaactacacaccgttccttatattttgttctcatagattaatatatatgttctctatttattgagtcacacacttataagtcgtattgtacaaattaaaggactccatagatgtggaaaaagctgccgtcttcgatggaccaattatctaagaccggacatcaagagaggaagattctcgttcgaggaagaagaaactatcattcagctacacagtgttatgggaaacaagtaagcctgatcattcacaccataatttttgtctgaaattcatattcatcagctacatgcttttgtatgttaattaatgtaaaactcaaaaagggagagtgtacgtttgcatgcgggggtacatgtcaaatgtaggccatcaactccaataaactattattagtactttactagtacgtattgacctatattagaataataataaaggagttttgtattgatcatagattaatgtcactaatattgaattgatgaatattaggtggtcagcaatagccgctcgtctaccagggaggaccgataacgaaataaaaaaccattggaacactcacatccgcaagagacttgtaaggagtggtatcgaccctgttactcattctccacgccttgatcttcttgatttgtcctcacttttgagtgcacttttcaaccagccaaacttttcagcagttgcaacacatgcgtcttctcttcttaatcctgatgtattgaggttggcctctctactactgccacttcaaaaccctaatccagtttacccatcgaacctcgaccaaaatcttcaaactccaaatacatcatcagaatcgtctcaaccacaagctgagactagtacagtcccaacaaactatgaaacttcatcattggagcctatgaacgcaagactcgacgacgttggtcttgcagatgtattaccacctttgtcagagagttttgacttagactcgctcatgtcaacgccaatgtcttctccacgacaaaatagcattgaagcagaaaccaactccagcactttcttcgactttggaattccggaagatttcatcttagatgactttatgtttgacccagctttcttgtacaaagtggcctaattttcaacatttgcatacacatgtcttgctttcacacatatgattctttgttgcattctttcttttgtttgatgtataaatttcttgtttttattctctcaaaagatattaagttattagtctataaaattttcatgaatgtttatgtattatctgcttaggcgagatatctaaattctgctccattagtccatatacacagttgacggaagcaaacatagaattattagcgtcaaacacatcacatattcatattgctttgttcgaatcatcgtcaatcaagttaatcagtttatgcgagttctatcatttaggcccaattcaaggcccaattcaagttcattttaaagccgttaatttggccagcaactttattatacatagttgataattcactggccgtcgttttacaacgtcgtgactgggaaaacgatctaactgactagccgcggccatggcggccgggagcggccatgctagagtccgcaaaaatcaccagtctctctctacaaatctatctctctctatttttctccagaataatgtgtgagtagttcccagataagggaattagggttcttatagggtttcgctcatgtgttgagcatataagaaacccttagtatgtatttgtatttgtaaaatacttctatcaataaaatttctaattcctaaaaccaaaatccagtgacctgcaggtcgaccatatgggag

SEQ ID NO: 10 - DNA, 12070 bp, synthetic construct
  misc_feature 1..12070: note = proGPAT5::MYB41 construct
  source 1..12070: mol_type = other DNA
agctcgaattatcatacatgagaattaagggagtcacgttatgacccccgccgatgacgcgggacaagccgttttacgtttggaactgacagaaccgcaacgttgaaggagccactgagccgcgggtttctggagtttaatgagctaagcacatacgtcagaaaccattattgcgcgttcaaaagtcgcctaaggtcactatcagctagcaaatatttcttgtcaaaaatgctccactgacgttccataaattcccctcggtatccaattagagtctcatattcactctcaactcgatcgaggggatctaccatgagcccagaacgacgcccggccgacatccgccgtgccaccgaggcggacatgccggcggtctgcaccatcgtcaaccactacatcgagacaagcacggtcaacttccgtaccgagccgcaggaaccgcaggagtggacggacgacctcgtccgtctgcgggagcgctatccctggctcgtcgccgaggtggacggcgaggtcgccggcatcgcctacgcgggtccctggaaggcacgcaacgcctacgactggacggccgagtcgaccgtgtacgtctccccccgccaccagcggacgggactgggctccacgctctacacccacctgctgaagtccctggaggcacagggcttcaagagcgtggtcgctgtcatcgggctgcccaacgacccgagcgtgcgcatgcacgaggcgctcggatatgccccccgcggcatgctgcgggcggccggcttcaagcacgggaactggcatgacgtgggtttctggcagctggacttcagcctgccggtgccgccccgtccggtcctgcccgtcaccgaaatctgatgacccctagagtcaagcagatcgttcaaacatttggcaataaagtttcttaagattgaatcctgttgccggtcttgcgatgattatcatataatttctgttgaattacgttaagcatgtaataattaacatgtaatgcatgacgttatttatgagatgggtttttatgattagagtcccgcaattatacatttaatacgcgatagaaaacaaaatatagcgcgcaaactaggataaattatcgcgcgcggtgtcatctatatgttactagatcgaccggcatgcaagctgataattcaattcggcgttaattcagtacattaaaaacgtccgcaatgtgttattaagttgtctaagcgtcaatttgtttacaccacaatatatcctgccaccagccagccaacagctccccgaccggcagctcggcacaaaatcaccactcgatacaggcagcccatcagtccgggacggcgtcagcgggagagccgttgtaaggcggcagactttgctcatgttaccgatgctattcggaagaacggcaactaagctgccgggtttgaaacacggatgatctcgcggagggtagcatgttgattgtaacgatgacagagcgttgctgcctgtgatcaattcgggcacgaacccagtggacataagcctcgttcggttcgtaagctgtaatgcaagtagcgtaactgccgtcacgcaactggtccagaaccttgaccgaacgcagcggtggtaacggcgcagtggcggttttcatggcttcttgttatgacatgtttttttggggtacagtctatgcctcgggcatccaagcagcaagcgcgttacgccgtgggtcgatgtttgatgttatggagcagcaacgatgttacgcagcagggcagtcgccctaaaacaaagttaaacatcatgggggaagcggtgatcgccgaagtatcgactcaactatcagaggtagttggcgtcatcgagcgccatctcgaaccgacgttgctggccgtacatttgtacggctccgcagtggatggcggcctgaagccacacagtgatattgatttgctggttacggtgaccgtaaggcttgatgaaacaacgcggcgagctttgatcaacgaccttttggaaacttcggcttcccctggagagagcgagattctccgcgctgtagaagtcaccattgttgtgcacgacgacatcattccgtggcgttatccagctaagcgcgaactgcaatttggagaatggcagcgcaatgacattcttgcaggtatcttcgagccagccacgatcgacattgatctggctatcttgctgacaaaagcaagagaacatagcgttgccttggtaggtccagcggcggaggaactctttgatccggttcctgaacaggatctatttgaggcgctaaatgaaaccttaacgctatggaactcgccgcccgactgggctggcgatgagcgaaatgtagtgcttacgttgtcccgcatttggtacagcgcagtaaccggcaaaatcgcgccgaaggatgtcgctgccgactgggcaatggagcgcctgccggcccagtatcagcccgtcatacttgaagctagacaggcttatcttggacaagaagaagatcgcttggcctcgcgcgcagatcagttggaagaatttgtccactacgtgaaaggcgagatcaccaaggtagtcggcaaataatgtctagctagaaattcgttcaagccgacgccgcttcgccggcgttaactcaagcgattagatgcactaagcacataattgctcacagccaaactatcaggtcaagtctgcttttattatttttaagcgtgcataataagccctacacaaattgggagatatatcatgcatgaccaaaatcccttaacgtgagttttcgttccactgagcgtcagaccccgtagaaaagatcaaaggatcttcttgagatcctttttttctgcgcgtaatctgctgcttgcaaacaaaaaaaccaccgctaccagcggtggtttgtttgccggatcaagagctaccaactctttttccgaaggtaactggcttcagcagagcgcagataccaaatactgtccttctagtgtagccgtagttaggccaccacttcaagaactctgtagcaccgcctacatacctcgctctgctaatcctgttaccagtggctgctgccagtggcgataagtcgtgtcttaccgggttggactcaagacgatagttaccggataaggcgcagcggtcgggctgaacggggggttcgtgcacacagcccagcttggagcgaacgacctacaccgaactgagatacctacagcgtgagctatgagaaagcgccacgcttcccgaagggagaaaggcggacaggtatccggtaagcggcagggtcggaacaggagagcgcacgagggagcttccagggggaaacgcctggtatctttatagtcctgtcgggtttcgccacctctgacttgagcgtcgatttttgtgatgctcgtcaggggggcggagcctatggaaaaacgccagcaacgcggcctttttacggttcctggccttttgctggccttttgctcacatgttctttcctgcgttatcccctgattctgtggataaccgtattaccgcctttgagtgagctgataccgctcgccgcagccgaacgaccgagcgcagcgagtcagtgagcgaggaagcggaagagcgcctgatgcggtattttctccttacgcatctgtgcggtatttcacaccgcatatggtgcactctcagtacaatctgctctgatgccgcatagttaagccagtatacactccgctatcgctacgtgactgggtcatggctgcgccccgacacccgccaacacccgctgacgcgccctgacgggcttgtctgctcccggcatccgcttacagacaagctgtgaccgtctccgggagctgcatgtgtcagaggttttcaccgtcatcaccgaaacgcgcgaggcagggtgccttgatgtgggcgccggcggtcgagtggcgacggcgcggcttgtccgcgccctggtagattgcctggccgtaggccagccatttttgagcggccagcggccgcgataggccgacgcgaagcggcggggcgtagggagcgcagcgaccgaagggtaggcgctttttgcagctcttcggctgtgcgctggccagacagttatgcacaggccaggcgggttttaagagttttaataagttttaaagagttttaggcggaaaaatcgccttttttctcttttatatcagtcacttacatgtgtgaccggttcccaatgtacggctttgggttcccaatgtacgggttccggttcccaatgtacggctttgggttcccaatgtacgtgctatccacaggaaagagaccttttcgacctttttcccctgctagggcaatttgccctagcatctgctccgtacattaggaaccggcggatgcttcgccctcgatcaggttgcggtagcgcatgactaggatcgggccagcctgccccgcctcctccttcaaatcgtactccggcaggtcatttgacccgatcagcttgcgcacggtgaaacagaacttcttgaactctccggcgctgccactgcgttcgtagatcgtcttgaacaaccatctggcttctgccttgcctgcggcgcggcgtgccaggcggtagagaaaacggccgatgccgggatcgatcaaaaagtaatcggggtgaaccgtcagcacgtccgggttcttgccttctgtgatctcgcggtacatccaatcagctagctcgatctcgatgtactccggccgcccggtttcgctctttacgatcttgtagcggctaatcaaggcttcaccctcggataccgtcaccaggcggccgttcttggccttcttcgtacgctgcatggcaacgtgcgtggtgtttaaccgaatgcaggtttctaccaggtcgtctttctgctttccgccatcggctcgccggcagaacttgagtacgtccgcaacgtgtggacggaacacgcggccgggcttgtctcccttcccttcccggtatcggttcatggattcggttagatgggaaaccgccatcagtaccaggtcgtaatcccacacactggccatgccggccggccctgcggaaacctctacgtgcccgtctggaagctcgtagcggatcacctcgccagctcgtcggtcacgcttcgacagacggaaaacggccacgtccatgatgctgcgactatcgcgggtgcccacgtcatagagcatcggaacgaaaaaatctggttgctcgtcgcccttgggcggcttcctaatcgacggcgcaccggctgccggcggttgccgggattctttgcggattcgatcagcggccgcttgccacgattcaccggggcgtgcttctgcctcgatgcgttgccgctgggcggcctgcgcggccttcaacttctccaccaggtcatcacccagcgccgcgccgatttgtaccgggccggatggtttgcgaccgtcacgccgattcctcgggcttgggggttccagtgccattgcagggccggcagacaacccagccgcttacgcctggccaaccgcccgttcctccacacatggggcattccacggcgtcggtgcctggttgttcttgattttccatgccgcctcctttagccgctaaaattcatctactcatttattcatttgctcatttactctggtagctgcgcgatgtattcagatagcagctcggtaatggtcttgccttggcgtaccgcgtacatcttcagcttggtgtgatcctccgccggcaactgaaagttgacccgcttcatggctggcgtgtctgccaggctggccaacgttgcagccttgctgctgcgtgcgctcggacggccggcacttagcgtgtttgtgcttttgctcattttctctttacctcattaactcaaatgagttttgatttaatttcagcggccagcgcctggacctcgcgggcagcgtcgccctcgggttctgattcaagaacggttgtgccggcggcggcagtgcctgggtagctcacgcgctgcgtgatacgggactcaagaatgggcagctcgtacccggccagcgcctcggcaacctcaccgccgatgcgcgtgcctttgatcgcccgcgacacgacaaaggccgcttgtagccttccatccgtgacctcaatgcgctgcttaaccagctccaccaggtcggcggtggcccatatgtcgtaagggcttggctgcaccggaatcagcacgaagtcggctgccttgatcgcggacacagccaagtccgccgcctggggcgctccgtcgatcactacgaagtcgcgccggccgatggccttcacgtcgcggtcaatcgtcgggcggtcgatgccgacaacggttagcggttgatcttcccgcacggccgcccaatcgcgggcactgccctggggatcggaatcgactaacagaacatcggccccggcgagttgcagggcgcgggctagatgggttgcgatggtcgtcttgcctgacccgcctttctggttaagtacagcgataaccttcatgcgttccccttgcgtatttgtttatttactcatcgcatcatatacgcagcgaccgcatgacgcaagctgttttactcaaatacacatcacctttttagacggcggcgctcggtttcttcagcggccaagctggccggccaggccgccagcttggcatcagacaaaccggccaggatttcatgcagccgcacggttgagacgtgcgcgggcggctcgaacacgtacccggccgcgatcatctccgcctcgatctcttcggtaatgaaaaacggttcgtcctggccgtcctggtgcggtttcatgcttgttcctcttggcgttcattctcggcggccgccagggcgtcggcctcggtcaatgcgtcctcacggaaggcaccgcgccgcctggcctcggtgggcgtcacttcctcgctgcgctcaagtgcgcggtacagggtcgagcgatgcacgccaagcagtgcagccgcctctttcacggtgcggccttcctggtcgatcagctcgcgggcgtgcgcgatctgtgccggggtgagggtagggcgggggccaaacttcacgcctcgggccttggcggcctcgcgcccgctccgggtgcggtcgatgattagggaacgctcgaactcggcaatgccggcgaacacggtcaacaccatgcggccggccggcgtggtggtgtcggcccacggctctgccaggctacgcaggcccgcgccggcctcctggatgcgctcggcaatgtccagtaggtcgcgggtgctgcgggccaggcggtctagcctggtcactgtcacaacgtcgccagggcgtaggtggtcaagcatcctggccagctccgggcggtcgcgcctggtgccggtgatcttctcggaaaacagcttggtgcagccggccgcgtgcagttcggcccgttggttggtcaagtcctggtcgtcggtgctgacgcgggcatagcccagcaggccagcggcggcgctcttgttcatggcgtaatgtctccggttctagtcgcaagtattctactttatgcgactaaaacacgcgacaagaaaacgccaggaaaagggcagggcggcagcctgtcgcgtaacttaggacttgtgcgacatgtcgttttcagaagacggctgcactgaacgtcagaagccgactgcactatagcagcggaggggttggatcaaagtactttgatcccgaggggaaccctgtggttggcatgcacatacaaatggacgaacggataaaccttttcacgcccttttaaatatccgttattctaataaacgctcttttctcttaggtttacccgccaatatatcctgtcaaacactgatagtttaaactgaaggcgggaaacgacaatctgatccaagctcaagctaagcttgggcccgagcggataacaatttcacacaggaaacagctatgaccatgattacgccaagctatcaactttgtatagaaaagttgcctgatcgcaaacgtcaatggtctatatccatctcttggggatacaccattcagatatacacttacttcttgactgctacggagctgactacgccgttgcagaccttcaaaacttggcggtcttccagcgatggacctttcgtgtttaacactcggcccttgaaacctgacccctgtgagcgtccggtcacttatttcatggatggtgccgaggatgtacgggatagtgggacgaaaacttggtatagcataggggataagaactatggtcattgcggaaagattgagcatactcgattaactaaagtgaagaggatattggtgacttcaatgaagacggatcctgagtattggaacaaggtacttagtgtttgtatatttctcatattgaatttaacattttgggtgagtttaggttacatctttttttttattttttgcttttgttgataggcaccgaggagacagtgttgtgaggtgatggaaggaaaagtaggaaaaagaaaagagaaagaaatgttgttaaggattagaaaatgcagatctttggagaagatataaaaaaagcgttttaattagagagatttttgcacatacagatttagattcgatcattagttatttgtttctaaattcctcaattcctagtaccaagagaatgacgattttctctagtaatactggcactcttcgtttttcaacatgtaaacattactttgtataattagtctatatcaaataaatagttacaacatgaacgtaactatttatacacgagggtaaatttttaacaaatttaaaccgaaccaaaaagatttcagttaatcatagttttgttacaagcgaaatctgaaatattcaccctcaagtttgttacgtaattgtctaatctgtgtttttttgtgctagtgttataattgtttcctcgaatgttaagcaccacatagaagtatacacttttcttttattattttcgttcttcttccatttagaaacttttattaattctactgttaaatccaacgttattagtttattttctctgatgaagttctaattttttttgtttgttggaaaaagggttacttttctgatgaagttgccgatttgtttccaaccaaacctcagctaatatagttagggagacggataagaaattgcataaagggagaggctttgtaaacacgcaagtttacgtcaacttgacacatataaactcgtatataggaattgtgtaaaatgttaatcaatatatgtttatgaatatagtccttttatttccttaatctatagtcatgttatcatcatatcggcaagaaaattactattacaacatatgtttccgtgcttcgatttgtcgatcaggtaggcaaccaaaccgggccagattagtcacaaatgaaattaggctccactttggcaagttttttcacaattaaaaattagaaagtctaaccaaactaatagaaactgaaccaaacaaaaatgttcacgcaattacgtagcacttctctatgaaatactgtggataattcgatttgagctaatctatggtaagtcgtttctctcaaactgaattaagctaaaccaaaccgaaaataaaccgttgtagaacacccataataaacatatatatgttctctactcttatttggctatttttccatttgcagatacgtgtgacaacattccaaatataggcacatgatacaaattacaaagccagaaattataatttataaactatacataataaggtcagtagcctaattacatccatatatttagttgggcataataaggatagcctaattttggtgcatcccgccaaaaattcggacaaatggtgaatttcaaaccatgaatttctttgttatacatacattacgtgcactattacatcaaagaaaaatagtgacgtgcataaacgtattttcttcacataatctatatataatatatacagccatgtacatttttcaacatagaaaaatcatgtatacaaatacggtaggtgcaatactgataaactgccattcccattgcattagacgctagtcaatccaaaccttataacataaaaagttatagtccatttctttcatatccaatcgagtcaaaataatattcgagcaaaaaacaaaagaagcaagtttgtacaaaaaagcaggctccatgggaagatcaccttgttgtgataaaaatggagtgaagaagggaccatggactgctgaggaggatcagaaactcatcgattatattcgatttcatggtcctggcaattggcgtacgctccccaaaaatgctggtacgtataaactacacaccgttccttatattttgttctcatagattaatatatatgttctctatttattgagtcacacacttataagtcgtattgtacaaattaaaggactccatagatgtggaaaaagctgccgtcttcgatggaccaattatctaagaccggacatcaagagaggaagattctcgttcgaggaagaagaaactatcattcagctacacagtgttatgggaaacaagtaagcctgatcattcacaccataatttttgtctgaaattcatattcatcagctacatgcttttgtatgttaattaatgtaaaactcaaaaagggagagtgtacgtttgcatgcgggggtacatgtcaaatgtaggccatcaactccaataaactattattagtactttactagtacgtattgacctatattagaataataataaaggagttttgtattgatcatagattaatgtcactaatattgaattgatgaatattaggtggtcagcaatagccgctcgtctaccagggaggaccgataacgaaataaaaaaccattggaacactcacatccgcaagagacttgtaaggagtggtatcgaccctgttactcattctccacgccttgatcttcttgatttgtcctcacttttgagtgcacttttcaaccagccaaacttttcagcagttgcaacacatgcgtcttctcttcttaatcctgatgtattgaggttggcctctctactactgccacttcaaaaccctaatccagtttacccatcgaacctcgaccaaaatcttcaaactccaaatacatcatcagaatcgtctcaaccacaagctgagactagtacagtcccaacaaactatgaaacttcatcattggagcctatgaacgcaagactcgacgacgttggtcttgcagatgtattaccacctttgtcagagagttttgacttagactcgctcatgtcaacgccaatgtcttctccacgacaaaatagcattgaagcagaaaccaactccagcactttcttcgactttggaattccggaagatttcatcttagatgactttatgtttgacccagctttcttgtacaaagtggcctaattttcaacatttgcatacacatgtcttgctttcacacatatgattctttgttgcattctttcttttgtttgatgtataaatttcttgtttttattctctcaaaagatattaagttattagtctataaaattttcatgaatgtttatgtattatctgcttaggcgagatatctaaattctgctccattagtccatatacacagttgacggaagcaaacatagaattattagcgtcaaacacatcacatattcatattgctttgttcgaatcatcgtcaatcaagttaatcagtttatgcgagttctatcatttaggcccaattcaaggcccaattcaagttcattttaaagccgttaatttggccagcaactttattatacatagttgataattcactggccgtcgttttacaacgtcgtgactgggaaaacgatctaactgactagccgcggccatggcggccgggagcggccatgctagagtccgcaaaaatcaccagtctctctctacaaatctatctctctctatttttctccagaataatgtgtgagtagttcccagataagggaattagggttcttatagggtttcgctcatgtgttgagcatataagaaacccttagtatgtatttgtatttgtaaaatacttctatcaataaaatttctaattcctaaaaccaaaatccagtgacctgcaggtcgaccatatgggag

SEQ ID NO: 11 - DNA, 11573 bp, synthetic construct
  misc_feature 1..11573: note = proRALPH::MYB41 construct
  source 1..11573: mol_type = other DNA
agctcgaattatcatacatgagaattaagggagtcacgttatgacccccgccgatgacgcgggacaagccgttttacgtttggaactgacagaaccgcaacgttgaaggagccactgagccgcgggtttctggagtttaatgagctaagcacatacgtcagaaaccattattgcgcgttcaaaagtcgcctaaggtcactatcagctagcaaatatttcttgtcaaaaatgctccactgacgttccataaattcccctcggtatccaattagagtctcatattcactctcaactcgatcgaggggatctaccatgagcccagaacgacgcccggccgacatccgccgtgccaccgaggcggacatgccggcggtctgcaccatcgtcaaccactacatcgagacaagcacggtcaacttccgtaccgagccgcaggaaccgcaggagtggacggacgacctcgtccgtctgcgggagcgctatccctggctcgtcgccgaggtggacggcgaggtcgccggcatcgcctacgcgggtccctggaaggcacgcaacgcctacgactggacggccgagtcgaccgtgtacgtctccccccgccaccagcggacgggactgggctccacgctctacacccacctgctgaagtccctggaggcacagggcttcaagagcgtggtcgctgtcatcgggctgcccaacgacccgagcgtgcgcatgcacgaggcgctcggatatgccccccgcggcatgctgcgggcggccggcttcaagcacgggaactggcatgacgtgggtttctggcagctggacttcagcctgccggtgccgccccgtccggtcctgcccgtcaccgaaatctgatgacccctagagtcaagcagatcgttcaaacatttggcaataaagtttcttaagattgaatcctgttgccggtcttgcgatgattatcatataatttctgttgaattacgttaagcatgtaataattaacatgtaatgcatgacgttatttatgagatgggtttttatgattagagtcccgcaattatacatttaatacgcgatagaaaacaaaatatagcgcgcaaactaggataaattatcgcgcgcggtgtcatctatatgttactagatcgaccggcatgcaagctgataattcaattcggcgttaattcagtacattaaaaacgtccgcaatgtgttattaagttgtctaagcgtcaatttgtttacaccacaatatatcctgccaccagccagccaacagctccccgaccggcagctcggcacaaaatcaccactcgatacaggcagcccatcagtccgggacggcgtcagcgggagagccgttgtaaggcggcagactttgctcatgttaccgatgctattcggaagaacggcaactaagctgccgggtttgaaacacggatgatctcgcggagggtagcatgttgattgtaacgatgacagagcgttgctgcctgtgatcaattcgggcacgaacccagtggacataagcctcgttcggttcgtaagctgtaatgcaagtagcgtaactgccgtcacgcaactggtccagaaccttgaccgaacgcagcggtggtaacggcgcagtggcggttttcatggcttcttgttatgacatgtttttttggggtacagtctatgcctcgggcatccaagcagcaagcgcgttacgccgtgggtcgatgtttgatgttatggagcagcaacgatgttacgcagcagggcagtcgccctaaaacaaagttaaacatcatgggggaagcggtgatcgccgaagtatcgactcaactatcagaggtagttggcgtcatcgagcgccatctcgaaccgacgttgctggccgtacatttgtacggctccgcagtggatggcggcctgaagccacacagtgatattgatttgctggttacggtgaccgtaaggcttgatgaaacaacgcggcgagctttgatcaacgaccttttggaaacttcggcttcccctggagagagcgagattctccgcgctgtagaagtcaccattgttgtgcacgacgacatcattccgtggcgttatccagctaagcgcgaactgcaatttggagaatggcagcgcaatgacattcttgcaggtatcttcgagccagccacgatcgacattgatctggctatcttgctgacaaaagcaagagaacatagcgttgccttggtaggtccagcggcggaggaactctttgatccggttcctgaacaggatctatttgaggcgctaaatgaaaccttaacgctatggaactcgccgcccgactgggctggcgatgagcgaaatgtagtgcttacgttgtcccgcatttggtacagcgcagtaaccggcaaaatcgcgccgaaggatgtcgctgccgactgggcaatggagcgcctgccggcccagtatcagcccgtcatacttgaagctagacaggcttatcttggacaagaagaagatcgcttggcctcgcgcgcagatcagttggaagaatttgtccactacgtgaaaggcgagatcaccaaggtagtcggcaaataatgtctagctagaaattcgttcaagccgacgccgcttcgccggcgttaactcaagcgattagatgcactaagcacataattgctcacagccaaactatcaggtcaagtctgcttttattatttttaagcgtgcataataagccctacacaaattgggagatatatcatgcatgaccaaaatcccttaacgtgagttttcgttccactgagcgtcagaccccgtagaaaagatcaaaggatcttcttgagatcctttttttctgcgcgtaatctgctgcttgcaaacaaaaaaaccaccgctaccagcggtggtttgtttgccggatcaagagctaccaactctttttccgaaggtaactggcttcagcagagcgcagataccaaatactgtccttctagtgtagccgtagttaggccaccacttcaagaactctgtagcaccgcctacatacctcgctctgctaatcctgttaccagtggctgctgccagtggcgataagtcgtgtcttaccgggttggactcaagacgatagttaccggataaggcgcagcggtcgggctgaacggggggttcgtgcacacagcccagcttggagcgaacgacctacaccgaactgagatacctacagcgtgagctatgagaaagcgccacgcttcccgaagggagaaaggcggacaggtatccggtaagcggcagggtcggaacaggagagcgcacgagggagcttccagggggaaacgcctggtatctttatagtcctgtcgggtttcgccacctctgacttgagcgtcgatttttgtgatgctcgtcaggggggcggagcctatggaaaaacgccagcaacgcggcctttttacggttcctggccttttgctggccttttgctcacatgttctttcctgcgttatcccctgattctgtggataaccgtattaccgcctttgagtgagctgataccgctcgccgcagccgaacgaccgagcgcagcgagtcagtgagcgaggaagcggaagagcgcctgatgcggtattttctccttacgcatctgtgcggtatttcacaccgcatatggtgcactctcagtacaatctgctctgatgccgcatagttaagccagtatacactccgctatcgctacgtgactgggtcatggctgcgccccgacacccgccaacacccgctgacgcgccctgacgggcttgtctgctcccggcatccgcttacagacaagctgtgaccgtctccgggagctgcatgtgtcagaggttttcaccgtcatcaccgaaacgcgcgaggcagggtgccttgatgtgggcgccggcggtcgagtggcgacggcgcggcttgtccgcgccctggtagattgcctggccgtaggccagccatttttgagcggccagcggccgcgataggccgacgcgaagcggcggggcgtagggagcgcagcgaccgaagggtaggcgctttttgcagctcttcggctgtgcgctggccagacagttatgcacaggccaggcgggttttaagagttttaataagttttaaagagttttaggcggaaaaatcgccttttttctcttttatatcagtcacttacatgtgtgaccggttcccaatgtacggctttgggttcccaatgtacgggttccggttcccaatgtacggctttgggttcccaatgtacgtgctatccacaggaaagagaccttttcgacctttttcccctgctagggcaatttgccctagcatctgctccgtacattaggaaccggcggatgcttcgccctcgatcaggttgcggtagcgcatgactaggatcgggccagcctgccccgcctcctccttcaaatcgtactccggcaggtcatttgacccgatcagcttgcgcacggtgaaacagaacttcttgaactctccggcgctgccactgcgttcgtagatcgtcttgaacaaccatctggcttctgccttgcctgcggcgcggcgtgccaggcggtagagaaaacggccgatgccgggatcgatcaaaaagtaatcggggtgaaccgtcagcacgtccgggttcttgccttctgtgatctcgcggtacatccaatcagctagctcgatctcgatgtactccggccgcccggtttcgctctttacgatcttgtagcggctaatcaaggcttcaccctcggataccgtcaccaggcggccgttcttggccttcttcgtacgctgcatggcaacgtgcgtggtgtttaaccgaatgcaggtttctaccaggtcgtctttctgctttccgccatcggctcgccggcagaacttgagtacgtccgcaacgtgtggacggaacacgcggccgggcttgtctcccttcccttcccggtatcggttcatggattcggttagatgggaaaccgccatcagtaccaggtcgtaatcccacacactggccatgccggccggccctgcggaaacctctacgtgcccgtctggaagctcgtagcggatcacctcgccagctcgtcggtcacgcttcgacagacggaaaacggccacgtccatgatgctgcgactatcgcgggtgcccacgtcatagagcatcggaacgaaaaaatctggttgctcgtcgcccttgggcggcttcctaatcgacggcgcaccggctgccggcggttgccgggattctttgcggattcgatcagcggccgcttgccacgattcaccggggcgtgcttctgcctcgatgcgttgccgctgggcggcctgcgcggccttcaacttctccaccaggtcatcacccagcgccgcgccgatttgtaccgggccggatggtttgcgaccgtcacgccgattcctcgggcttgggggttccagtgccattgcagggccggcagacaacccagccgcttacgcctggccaaccgcccgttcctccacacatggggcattccacggcgtcggtgcctggttgttcttgattttccatgccgcctcctttagccgctaaaattcatctactcatttattcatttgctcatttactctggtagctgcgcgatgtattcagatagcagctcggtaatggtcttgccttggcgtaccgcgtacatcttcagcttggtgtgatcctccgccggcaactgaaagttgacccgcttcatggctggcgtgtctgccaggctggccaacgttgcagccttgctgctgcgtgcgctcggacggccggcacttagcgtgtttgtgcttttgctcattttctctttacctcattaactcaaatgagttttgatttaatttcagcggccagcgcctggacctcgcgggcagcgtcgccctcgggttctgattcaagaacggttgtgccggcggcggcagtgcctgggtagctcacgcgctgcgtgatacgggactcaagaatgggcagctcgtacccggccagcgcctcggcaacctcaccgccgatgcgcgtgcctttgatcgcccgcgacacgacaaaggccgcttgtagccttccatccgtgacctcaatgcgctgcttaaccagctccaccaggtcggcggtggcccatatgtcgtaagggcttggctgcaccggaatcagcacgaagtcggctgccttgatcgcggacacagccaagtccgccgcctggggcgctccgtcgatcactacgaagtcgcgccggccgatggccttcacgtcgcggtcaatcgtcgggcggtcgatgccgacaacggttagcggttgatcttcccgcacggccgcccaatcgcgggcactgccctggggatcggaatcgactaacagaacatcggccccggcgagttgcagggcgcgggctagatgggttgcgatggtcgtcttgcctgacccgcctttctggttaagtacagcgataaccttcatgcgttccccttgcgtatttgtttatttactcatcgcatcatatacgcagcgaccgcatgacgcaagctgttttactcaaatacacatcacctttttagacggcggcgctcggtttcttcagcggccaagctggccggccaggccgccagcttggcatcagacaaaccggccaggatttcatgcagccgcacggttgagacgtgcgcgggcggctcgaacacgtacccggccgcgatcatctccgcctcgatctcttcggtaatgaaaaacggttcgtcctggccgtcctggtgcggtttcatgcttgttcctcttggcgttcattctcggcggccgccagggcgtcggcctcggtcaatgcgtcctcacggaaggcaccgcgccgcctggcctcggtgggcgtcacttcctcgctgcgctcaagtgcgcggtacagggtcgagcgatgcacgccaagcagtgcagccgcctctttcacggtgcggccttcctggtcgatcagctcgcgggcgtgcgcgatctgtgccggggtgagggtagggcgggggccaaacttcacgcctcgggccttggcggcctcgcgcccgctccgggtgcggtcgatgattagggaacgctcgaactcggcaatgccggcgaacacggtcaacaccatgcggccggccggcgtggtggtgtcggcccacggctctgccaggctacgcaggcccgcgccggcctcctggatgcgctcggcaatgtccagtaggtcgcgggtgctgcgggccaggcggtctagcctggtcactgtcacaacgtcgccagggcgtaggtggtcaagcatcctggccagctccgggcggtcgcgcctggtgccggtgatcttctcggaaaacagcttggtgcagccggccgcgtgcagttcggcccgttggttggtcaagtcctggtcgtcggtgctgacgcgggcatagcccagcaggccagcggcggcgctcttgttcatggcgtaatgtctccggttctagtcgcaagtattctactttatgcgactaaaacacgcgacaagaaaacgccaggaaaagggcagggcggcagcctgtcgcgtaacttaggacttgtgcgacatgtcgttttcagaagacggctgcactgaacgtcagaagccgactgcactatagcagcggaggggttggatcaaagtactttgatcccgaggggaaccctgtggttggcatgcacatacaaatggacgaacggataaaccttttcacgcccttttaaatatccgttattctaataaacgctcttttctcttaggtttacccgccaatatatcctgtcaaacactgatagtttaaactgaaggcgggaaacgacaatctgatccaagctcaagctaagcttgggcccgagcggataacaatttcacacaggaaacagctatgaccatgattacgccaagctatcaactttgtatagaaaagttgccctttcctctgaaacgattctccacgctctttgtttataaggattgcaagaaattactgaagaacatcaggaatcgcgagagcttggggcgaatcaaaaacctccattgatgaagaagactgcatctagtactttacttactcggtagcacacctccatgggcaggctccagcaccatggttgggcccatttcttattaatgggcctaaaatagagcttctagggcctctatatattttgtcttttctcttccgtttaggcgttttgctaactttcttacgtatatgaatgtgaattatagttagttaactttagaactgttgagcggccaatgccacgtcctttgtacgtaaattatgttattcatgctattatttatgtaccaattttctattctaatatatattctaagttttttttgtatcaatactaagtatttatacaatttttgcaaattttgacagaaagatagtacaaaaaatatgaaagaccaaaaactacataaaccaccaaaaattacaacacaaacagaaaacggaaagaaaactcaatcgaaaactctacaagtagagaccttaaaagaaacttagattccaaaccacaaagctcaaatatttgtgtggtttcctcaacttaaaagatctcaaatacttatagttgttgccactagcaatccaaacctaggccagttttcaaaatctctaaaaaagagcttaccattccaaacttaggacaatcctcataatattttaaattttatgacattttttagttttttcttaccgaacatagagatacaacgaataacacaaaataccaaattttactaaacaaacaattactgcacaaatgaaaaagtaatcaacaacatgagctcatttcacgaaaaaagaagcgaaaaagccaacggtcttgccacaaattagtatattgcaaattacaaatgcttaaaaaaattcacagatatattcatcaattataccttttgattatcttgcaaataaatcttccaattcatattacctacgtcaaaatttagccatctacccttattatcccattatgaaaatttcaaaatcgataagatgacagacacccaacaacgaattatcattttatatactataggtattagatacctacaatttatttggtttattgggaatatacgattcataaattccctcataaaaatataaagcaaatgtggacggaagcaaaaaaactaaatatagaatggagagaaattgtattattaacttaggttacccatcgccaacaacctctcatttcctttcctaaactatttcacaattttggtcaaaaacacaatctaaccccaaaaaagattcgacctttgaaattcccaaaaccagaagcaaaacccccaaaagaaccctacttatagtgaaagaaaagtaacataataatatatatacacgagaaccaagagccacttgaatataaagttcacagtttttgtctgctcaccaaatcaaaccaatttctcctgatagccaaagtttttgtccccaacaagaaactcatgcaacattcttcacccactagctaactaacgacttccattcttattaatctctctcaattcttcatttctgagattcatcgctctctcttctctttgtcacagcaagtttgtacaaaaaagcaggctccatgggaagatcaccttgttgtgataaaaatggagtgaagaagggaccatggactgctgaggaggatcagaaactcatcgattatattcgatttcatggtcctggcaattggcgtacgctccccaaaaatgctggtacgtataaactacacaccgttccttatattttgttctcatagattaatatatatgttctctatttattgagtcacacacttataagtcgtattgtacaaattaaaggactccatagatgtggaaaaagctgccgtcttcgatggaccaattatctaagaccggacatcaagagaggaagattctcgttcgaggaagaagaaactatcattcagctacacagtgttatgggaaacaagtaagcctgatcattcacaccataatttttgtctgaaattcatattcatcagctacatgcttttgtatgttaattaatgtaaaactcaaaaagggagagtgtacgtttgcatgcgggggtacatgtcaaatgtaggccatcaactccaataaactattattagtactttactagtacgtattgacctatattagaataataataaaggagttttgtattgatcatagattaatgtcactaatattgaattgatgaatattaggtggtcagcaatagccgctcgtctaccagggaggaccgataacgaaataaaaaaccattggaacactcacatccgcaagagacttgtaaggagtggtatcgaccctgttactcattctccacgccttgatcttcttgatttgtcctcacttttgagtgcacttttcaaccagccaaacttttcagcagttgcaacacatgcgtcttctcttcttaatcctgatgtattgaggttggcctctctactactgccacttcaaaaccctaatccagtttacccatcgaacctcgaccaaaatcttcaaactccaaatacatcatcagaatcgtctcaaccacaagctgagactagtacagtcccaacaaactatgaaacttcatcattggagcctatgaacgcaagactcgacgacgttggtcttgcagatgtattaccacctttgtcagagagttttgacttagactcgctcatgtcaacgccaatgtcttctccacgacaaaatagcattgaagcagaaaccaactccagcactttcttcgactttggaattccggaagatttcatcttagatgactttatgtttgacccagctttcttgtacaaagtggcctaattttcaacatttgcatacacatgtcttgctttcacacatatgattctttgttgcattctttcttttgtttgatgtataaatttcttgtttttattctctcaaaagatattaagttattagtctataaaattttcatgaatgtttatgtattatctgcttaggcgagatatctaaattctgctccattagtccatatacacagttgacggaagcaaacatagaattattagcgtcaaacacatcacatattcatattgctttgttcgaatcatcgtcaatcaagttaatcagtttatgcgagttctatcatttaggcccaattcaaggcccaattcaagttcattttaaagccgttaatttggccagcaactttattatacatagttgataattcactggccgtcgttttacaacgtcgtgactgggaaaacgatctaactgactagccgcggccatggcggccgggagcggccatgctagagtccgcaaaaatcaccagtctctctctacaaatctatctctctctatttttctccagaataatgtgtgagtagttcccagataagggaattagggttcttatagggtttcgctcatgtgttgagcatataagaaacccttagtatgtatttgtatttgtaaaatacttctatcaataaaatttctaattcctaaaaccaaaatccagtgacctgcaggtcgaccatatgggag

SEQ ID NO: 12 - DNA, 12171 bp, synthetic construct
  misc_feature 1..12171: note = proMYB84::MYB41 construct
  source 1..12171: mol_type = other DNA
agctcgaattatcatacatgagaattaagggagtcacgttatgacccccgccgatgacgcgggacaagccgttttacgtttggaactgacagaaccgcaacgttgaaggagccactgagccgcgggtttctggagtttaatgagctaagcacatacgtcagaaaccattattgcgcgttcaaaagtcgcctaaggtcactatcagctagcaaatatttcttgtcaaaaatgctccactgacgttccataaattcccctcggtatccaattagagtctcatattcactctcaactcgatcgaggggatctaccatgagcccagaacgacgcccggccgacatccgccgtgccaccgaggcggacatgccggcggtctgcaccatcgtcaaccactacatcgagacaagcacggtcaacttccgtaccgagccgcaggaaccgcaggagtggacggacgacctcgtccgtctgcgggagcgctatccctggctcgtcgccgaggtggacggcgaggtcgccggcatcgcctacgcgggtccctggaaggcacgcaacgcctacgactggacggccgagtcgaccgtgtacgtctccccccgccaccagcggacgggactgggctccacgctctacacccacctgctgaagtccctggaggcacagggcttcaagagcgtggtcgctgtcatcgggctgcccaacgacccgagcgtgcgcatgcacgaggcgctcggatatgccccccgcggcatgctgcgggcggccggcttcaagcacgggaactggcatgacgtgggtttctggcagctggacttcagcctgccggtgccgccccgtccggtcctgcccgtcaccgaaatctgatgacccctagagtcaagcagatcgttcaaacatttggcaataaagtttcttaagattgaatcctgttgccggtcttgcgatgattatcatataatttctgttgaattacgttaagcatgtaataattaacatgtaatgcatgacgttatttatgagatgggtttttatgattagagtcccgcaattatacatttaatacgcgatagaaaacaaaatatagcgcgcaaactaggataaattatcgcgcgcggtgtcatctatatgttactagatcgaccggcatgcaagctgataattcaattcggcgttaattcagtacattaaaaacgtccgcaatgtgttattaagttgtctaagcgtcaatttgtttacaccacaatatatcctgccaccagccagccaacagctccccgaccggcagctcggcacaaaatcaccactcgatacaggcagcccatcagtccgggacggcgtcagcgggagagccgttgtaaggcggcagactttgctcatgttaccgatgctattcggaagaacggcaactaagctgccgggtttgaaacacggatgatctcgcggagggtagcatgttgattgtaacgatgacagagcgttgctgcctgtgatcaattcgggcacgaacccagtggacataagcctcgttcggttcgtaagctgtaatgcaagtagcgtaactgccgtcacgcaactggtccagaaccttgaccgaacgcagcggtggtaacggcgcagtggcggttttcatggcttcttgttatgacatgtttttttggggtacagtctatgcctcgggcatccaagcagcaagcgcgttacgccgtgggtcgatgtttgatgttatggagcagcaacgatgttacgcagcagggcagtcgccctaaaacaaagttaaacatcatgggggaagcggtgatcgccgaagtatcgactcaactatcagaggtagttggcgtcatcgagcgccatctcgaaccgacgttgctggccgtacatttgtacggctccgcagtggatggcggcctgaagccacacagtgatattgatttgctggttacggtgaccgtaaggcttgatgaaacaacgcggcgagctttgatcaacgaccttttggaaacttcggcttcccctggagagagcgagattctccgcgctgtagaagtcaccattgttgtgcacgacgacatcattccgtggcgttatccagctaagcgcgaactgcaatttggagaatggcagcgcaatgacattcttgcaggtatcttcgagccagccacgatcgacattgatctggctatcttgctgacaaaagcaagagaacatagcgttgccttggtaggtccagcggcggaggaactctttgatccggttcctgaacaggatctatttgaggcgctaaatgaaaccttaacgctatggaactcgccgcccgactgggctggcgatgagcgaaatgtagtgcttacgttgtcccgcatttggtacagcgcagtaaccggcaaaatcgcgccgaaggatgtcgctgccgactgggcaatggagcgcctgccggcccagtatcagcccgtcatacttgaagctagacaggcttatcttggacaagaagaagatcgcttggcctcgcgcgcagatcagttggaagaatttgtccactacgtgaaaggcgagatcaccaaggtagtcggcaaataatgtctagctagaaattcgttcaagccgacgccgcttcgccggcgttaactcaagcgattagatgcactaagcacataattgctcacagccaaactatcaggtcaagtctgcttttattatttttaagcgtgcataataagccctacacaaattgggagatatatcatgcatgaccaaaatcccttaacgtgagttttcgttccactgagcgtcagaccccgtagaaaagatcaaaggatcttcttgagatcctttttttctgcgcgtaatctgctgcttgcaaacaaaaaaaccaccgctaccagcggtggtttgtttgccggatcaagagctaccaactctttttccgaaggtaactggcttcagcagagcgcagataccaaatactgtccttctagtgtagccgtagttaggccaccacttcaagaactctgtagcaccgcctacatacctcgctctgctaatcctgttaccagtggctgctgccagtggcgataagtcgtgtcttaccgggttggactcaagacgatagttaccggataaggcgcagcggtcgggctgaacggggggttcgtgcacacagcccagcttggagcgaacgacctacaccgaactgagatacctacagcgtgagctatgagaaagcgccacgcttcccgaagggagaaaggcggacaggtatccggtaagcggcagggtcggaacaggagagcgcacgagggagcttccagggggaaacgcctggtatctttatagtcctgtcgggtttcgccacctctgacttgagcgtcgatttttgtgatgctcgtcaggggggcggagcctatggaaaaacgccagcaacgcggcctttttacggttcctggccttttgctggccttttgctcacatgttctttcctgcgttatcccctgattctgtggataaccgtattaccgcctttgagtgagctgataccgctcgccgcagccgaacgaccgagcgcagcgagtcagtgagcgaggaagcggaagagcgcctgatgcggtattttctccttacgcatctgtgcggtatttcacaccgcatatggtgcactctcagtacaatctgctctgatgccgcatagttaagccagtatacactccgctatcgctacgtgactgggtcatggctgcgccccgacacccgccaacacccgctgacgcgccctgacgggcttgtctgctcccggcatccgcttacagacaagctgtgaccgtctccgggagctgcatgtgtcagaggttttcaccgtcatcaccgaaacgcgcgaggcagggtgccttgatgtgggcgccggcggtcgagtggcgacggcgcggcttgtccgcgccctggtagattgcctggccgtaggccagccatttttgagcggccagcggccgcgataggccgacgcgaagcggcggggcgtagggagcgcagcgaccgaagggtaggcgctttttgcagctcttcggctgtgcgctggccagacagttatgcacaggccaggcgggttttaagagttttaataagttttaaagagttttaggcggaaaaatcgccttttttctcttttatatcagtcacttacatgtgtgaccggttcccaatgtacggctttgggttcccaatgtacgggttccggttcccaatgtacggctttgggttcccaatgtacgtgctatccacaggaaagagaccttttcgacctttttcccctgctagggcaatttgccctagcatctgctccgtacattaggaaccggcggatgcttcgccctcgatcaggttgcggtagcgcatgactaggatcgggccagcctgccccgcctcctccttcaaatcgtactccggcaggtcatttgacccgatcagcttgcgcacggtgaaacagaacttcttgaactctccggcgctgccactgcgttcgtagatcgtcttgaacaaccatctggcttctgccttgcctgcggcgcggcgtgccaggcggtagagaaaacggccgatgccgggatcgatcaaaaagtaatcggggtgaaccgtcagcacgtccgggttcttgccttctgtgatctcgcggtacatccaatcagctagctcgatctcgatgtactccggccgcccggtttcgctctttacgatcttgtagcggctaatcaaggcttcaccctcggataccgtcaccaggcggccgttcttggccttcttcgtacgctgcatggcaacgtgcgtggtgtttaaccgaatgcaggtttctaccaggtcgtctttctgctttccgccatcggctcgccggcagaacttgagtacgtccgcaacgtgtggacggaacacgcggccgggcttgtctcccttcccttcccggtatcggttcatggattcggttagatgggaaaccgccatcagtaccaggtcgtaatcccacacactggccatgccggccggccctgcggaaacctctacgtgcccgtctggaagctcgtagcggatcacctcgccagctcgtcggtcacgcttcgacagacggaaaacggccacgtccatgatgctgcgactatcgcgggtgcccacgtcatagagcatcggaacgaaaaaatctggttgctcgtcgcccttgggcggcttcctaatcgacggcgcaccggctgccggcggttgccgggattctttgcggattcgatcagcggccgcttgccacgattcaccggggcgtgcttctgcctcgatgcgttgccgctgggcggcctgcgcggccttcaacttctccaccaggtcatcacccagcgccgcgccgatttgtaccgggccggatggtttgcgaccgtcacgccgattcctcgggcttgggggttccagtgccattgcagggccggcagacaacccagccgcttacgcctggccaaccgcccgttcctccacacatggggcattccacggcgtcggtgcctggttgttcttgattttccatgccgcctcctttagccgctaaaattcatctactcatttattcatttgctcatttactctggtagctgcgcgatgtattcagatagcagctcggtaatggtcttgccttggcgtaccgcgtacatcttcagcttggtgtgatcctccgccggcaactgaaagttgacccgcttcatggctggcgtgtctgccaggctggccaacgttgcagccttgctgctgcgtgcgctcggacggccggcacttagcgtgtttgtgcttttgctcattttctctttacctcattaactcaaatgagttttgatttaatttcagcggccagcgcctggacctcgcgggcagcgtcgccctcgggttctgattcaagaacggttgtgccggcggcggcagtgcctgggtagctcacgcgctgcgtgatacgggactcaagaatgggcagctcgtacccggccagcgcctcggcaacctcaccgccgatgcgcgtgcctttgatcgcccgcgacacgacaaaggccgcttgtagccttccatccgtgacctcaatgcgctgcttaaccagctccaccaggtcggcggtggcccatatgtcgtaagggcttggctgcaccggaatcagcacgaagtcggctgccttgatcgcggacacagccaagtccgccgcctggggcgctccgtcgatcactacgaagtcgcgccggccgatggccttcacgtcgcggtcaatcgtcgggcggtcgatgccgacaacggttagcggttgatcttcccgcacggccgcccaatcgcgggcactgccctggggatcggaatcgactaacagaacatcggccccggcgagttgcagggcgcgggctagatgggttgcgatggtcgtcttgcctgacccgcctttctggttaagtacagcgataaccttcatgcgttccccttgcgtatttgtttatttactcatcgcatcatatacgcagcgaccgcatgacgcaagctgttttactcaaatacacatcacctttttagacggcggcgctcggtttcttcagcggccaagctggccggccaggccgccagcttggcatcagacaaaccggccaggatttcatgcagccgcacggttgagacgtgcgcgggcggctcgaacacgtacccggccgcgatcatctccgcctcgatctcttcggtaatgaaaaacggttcgtcctggccgtcctggtgcggtttcatgcttgttcctcttggcgttcattctcggcggccgccagggcgtcggcctcggtcaatgcgtcctcacggaaggcaccgcgccgcctggcctcggtgggcgtcacttcctcgctgcgctcaagtgcgcggtacagggtcgagcgatgcacgccaagcagtgcagccgcctctttcacggtgcggccttcctggtcgatcagctcgcgggcgtgcgcgatctgtgccggggtgagggtagggcgggggccaaacttcacgcctcgggccttggcggcctcgcgcccgctccgggtgcggtcgatgattagggaacgctcgaactcggcaatgccggcgaacacggtcaacaccatgcggccggccggcgtggtggtgtcggcccacggctctgccaggctacgcaggcccgcgccggcctcctggatgcgctcggcaatgtccagtaggtcgcgggtgctgcgggccaggcggtctagcctggtcactgtcacaacgtcgccagggcgtaggtggtcaagcatcctggccagctccgggcggtcgcgcctggtgccggtgatcttctcggaaaacagcttggtgcagccggccgcgtgcagttcggcccgttggttggtcaagtcctggtcgtcggtgctgacgcgggcatagcccagcaggccagcggcggcgctcttgttcatggcgtaatgtctccggttctagtcgcaagtattctactttatgcgactaaaacacgcgacaagaaaacgccaggaaaagggcagggcggcagcctgtcgcgtaacttaggacttgtgcgacatgtcgttttcagaagacggctgcactgaacgtcagaagccgactgcactatagcagcggaggggttggatcaaagtactttgatcccgaggggaaccctgtggttggcatgcacatacaaatggacgaacggataaaccttttcacgcccttttaaatatccgttattctaataaacgctcttttctcttaggtttacccgccaatatatcctgtcaaacactgatagtttaaactgaaggcgggaaacgacaatctgatccaagctcaagctaagcttgggcccgagcggataacaatttcacacaggaaacagctatgaccatgattacgccaagctatcaactttgtatagaaaagttgcctctgagacatcattgatatctaacaatcaaaaactaaaaagtgaagtattaacattttaatcagattcaaaccagaacttatcagtcatcaaaaatgttggcaaataacaaatcaaacttaagtttttggatggagaaagcaagctagattcgaatctctaagaagcgtggacttggacttgtttacgacctgaaaagatgtcatgattatctcatgattacgagataataacatgtcttatctactaaactaatctaaaaagtagtgaggatgacttgaaacttaagtcttatatgaattatctttaaatatagaaaaagaaaggagatagagaggtgtgtttttcatgtgaacaacttttttttacctttagagtacttccagaagacttattgggtccttaataaaagtagaccaaattattgaagagctaaaaaaaaatgcctactcaaaatatccaaacctcttcttttagccttttgtttttttcaatattcatactaatgtaaactacaatcattgtatcattctataatcatatgaattttttgtcaacaccatgcattatgctagtttaaatttaggtgatgatataaagatattttaagtacaaatcaataggggcgatgttcttatgtctttatctaactttatgaatttgtgttttatatattatgaaaaattggaaaagaagagatggcctacgctcaagaccaattcctaccaatgggcaatggtgttgaaatctgaacaaaaaaatttcctttctttaacgttagctttaaagttcaaaaaactttatttactttttcagtgataattctgtataaaataacatataacaatgaggaaaaaactcaataatttgaatcgcttatgactttatttctccaagtgcttgacttttaaaaccctaatgtccaatctcaactaaagtcaacctttttcgttcgtctagaagagtcagtcattaagtttcaattgaagtatacagtaaattattagtactttttattttattttaaccacagttcattggctgtatgagatttctgttcaagaaaacatataaatcgaaaccaaagcaaaagacattatttgcttcggtttcttctactcaagctcatttttagtaaaactaaattgtattttcattttcttaaaaagttaattgttttttttgtaaaatcagttttaccaaattggacacaataatgaatatatgtctatgtctagttttttttagctcagaatatatcttatgtgaatagaatcgtctatcagatatttttgtgatgcagatagaacttaccgttatagaatcatttgtagattgttcatcgtgattgttaagattagattcccatttgtaatataacagaaactcgaaaagtacttatattaagtattaacgatgtatcatgtgaccaaaatagaaaatactacgtaatgatatgattattaagcgagtgtgtaggtaattcaaatatttcaattaatcaatctttgatatcactctttagagtaatgtattatctttcttattgttttaccctgggattaataagtttaccggatccggagtagaatttcttcggtttggcaattttgttcacctaccataacgaacttttacccttatacttagtttcaatctacttttggtgcatcctttcattttcaactgcaaagaagtagttaaaagatccaatacataatatatttaatttatcataagtaacttagtgtaaagaaagactaaagtactttttaaaatatgtatttgtatttcccgatgtgaaagaaaagaaaattgaatttgcacatatcaataatattagctaggaaaaaacttgtgagaaatttctttgacgacttgcgtgtgcaatagtcttccttatcttctctaccatttcttaattccactattgtatagtatttacttatgttgaattaataaattaaaacatttaaatttccctaaagttactttttgatttttgattttctatttttattacaactttcctactttttgacatcttttcttacaaagactttttgacatctccccctccagctattatatagtctccttttttcttttctgcattcacataatatttcccctatatagtttacacaacatcatacccaccaacatatataatcttgatcatagagagataaacagaggccgctatcaagaacaagactaagaacaagacttcactaggagtacaagtgcaagtttgtacaaaaaagcaggctccatgggaagatcaccttgttgtgataaaaatggagtgaagaagggaccatggactgctgaggaggatcagaaactcatcgattatattcgatttcatggtcctggcaattggcgtacgctccccaaaaatgctggtacgtataaactacacaccgttccttatattttgttctcatagattaatatatatgttctctatttattgagtcacacacttataagtcgtattgtacaaattaaaggactccatagatgtggaaaaagctgccgtcttcgatggaccaattatctaagaccggacatcaagagaggaagattctcgttcgaggaagaagaaactatcattcagctacacagtgttatgggaaacaagtaagcctgatcattcacaccataatttttgtctgaaattcatattcatcagctacatgcttttgtatgttaattaatgtaaaactcaaaaagggagagtgtacgtttgcatgcgggggtacatgtcaaatgtaggccatcaactccaataaactattattagtactttactagtacgtattgacctatattagaataataataaaggagttttgtattgatcatagattaatgtcactaatattgaattgatgaatattaggtggtcagcaatagccgctcgtctaccagggaggaccgataacgaaataaaaaaccattggaacactcacatccgcaagagacttgtaaggagtggtatcgaccctgttactcattctccacgccttgatcttcttgatttgtcctcacttttgagtgcacttttcaaccagccaaacttttcagcagttgcaacacatgcgtcttctcttcttaatcctgatgtattgaggttggcctctctactactgccacttcaaaaccctaatccagtttacccatcgaacctcgaccaaaatcttcaaactccaaatacatcatcagaatcgtctcaaccacaagctgagactagtacagtcccaacaaactatgaaacttcatcattggagcctatgaacgcaagactcgacgacgttggtcttgcagatgtattaccacctttgtcagagagttttgacttagactcgctcatgtcaacgccaatgtcttctccacgacaaaatagcattgaagcagaaaccaactccagcactttcttcgactttggaattccggaagatttcatcttagatgactttatgtttgacccagctttcttgtacaaagtggcctaattttcaacatttgcatacacatgtcttgctttcacacatatgattctttgttgcattctttcttttgtttgatgtataaatttcttgtttttattctctcaaaagatattaagttattagtctataaaattttcatgaatgtttatgtattatctgcttaggcgagatatctaaattctgctccattagtccatatacacagttgacggaagcaaacatagaattattagcgtcaaacacatcacatattcatattgctttgttcgaatcatcgtcaatcaagttaatcagtttatgcgagttctatcatttaggcccaattcaaggcccaattcaagttcattttaaagccgttaatttggccagcaactttattatacatagttgataattcactggccgtcgttttacaacgtcgtgactgggaaaacgatctaactgactagccgcggccatggcggccgggagcggccatgctagagtccgcaaaaatcaccagtctctctctacaaatctatctctctctatttttctccagaataatgtgtgagtagttcccagataagggaattagggttcttatagggtttcgctcatgtgttgagcatataagaaacccttagtatgtatttgtatttgtaaaatacttctatcaataaaatttctaattcctaaaaccaaaatccagtgacctgcaggtcgaccatatgggag

SEQ ID NO: 13 - DNA, 1216 bp, Arabidopsis thaliana
  source 1..1216: mol_type = genomic DNA
atgggaagatcaccttgttgtgataaaaatggagtgaagaagggaccatggactgctgaggaggatcagaaactcatcgattatattcgatttcatggtcctggcaattggcgtacgctccccaaaaatgctggtacgtataaactacacaccgttccttatattttgttctcatagattaatatatatgttctctatttattgagtcacacacttataagtcgtattgtacaaattaaaggactccatagatgtggaaaaagctgccgtcttcgatggaccaattatctaagaccggacatcaagagaggaagattctcgttcgaggaagaagaaactatcattcagctacacagtgttatgggaaacaagtaagcctgatcattcacaccataatttttgtctgaaattcatattcatcagctacatgcttttgtatgttaattaatgtaaaactcaaaaagggagagtgtacgtttgcatgcgggggtacatgtcaaatgtaggccatcaactccaataaactattattagtactttactagtacgtattgacctatattagaataataataaaggagttttgtattgatcatagattaatgtcactaatattgaattgatgaatattaggtggtcagcaatagccgctcgtctaccagggaggaccgataacgaaataaaaaaccattggaacactcacatccgcaagagacttgtaaggagtggtatcgaccctgttactcattctccacgccttgatcttcttgatttgtcctcacttttgagtgcacttttcaaccagccaaacttttcagcagttgcaacacatgcgtcttctcttcttaatcctgatgtattgaggttggcctctctactactgccacttcaaaaccctaatccagtttacccatcgaacctcgaccaaaatcttcaaactccaaatacatcatcagaatcgtctcaaccacaagctgagactagtacagtcccaacaaactatgaaacttcatcattggagcctatgaacgcaagactcgacgacgttggtcttgcagatgtattaccacctttgtcagagagttttgacttagactcgctcatgtcaacgccaatgtcttctccacgacaaaatagcattgaagcagaaaccaactccagcactttcttcgactttggaattccggaagatttcatcttagatgactttatgttt

SEQ ID NO: 14 - protein, 282 aa, Arabidopsis thaliana
MGRSPCCDKNGVKKGPWTAEEDQKLIDYIRFHGPGNWRTLPKNAGLHRCGKSCRLRWTNYLRPDIKRGRFSFEEEETIIQLHSVMGNKWSAIAARLPGRTDNEIKNHWNTHIRKRLVRSGIDPVTHSPRLDLLDLSSLLSALFNQPNFSAVATHASSLLNPDVLRLASLLLPLQNPNPVYPSNLDQNLQTPNTSSESSQPQAETSTVPTNYETSSLEPMNARLDDVGLADVLPPLSESFDLDSLMSTPMSSPRQNSIEAETNSSTFFDFGIPEDFILDDFMF

SEQ ID NO: 15 - DNA, 849 bp, Arabidopsis thaliana
  source 1..849: mol_type = genomic DNA
atgggaagatcaccttgttgtgataaaaatggagtgaagaagggaccatggactgctgaggaggatcagaaactcatcgattatattcgatttcatggtcctggcaattggcgtacgctccccaaaaatgctggactccatagatgtggaaaaagctgccgtcttcgatggaccaattatctaagaccggacatcaagagaggaagattctcgttcgaggaagaagaaactatcattcagctacacagtgttatgggaaacaagtggtcagcaatagccgctcgtctaccagggaggaccgataacgaaataaaaaaccattggaacactcacatccgcaagagacttgtaaggagtggtatcgaccctgttactcattctccacgccttgatcttcttgatttgtcctcacttttgagtgcacttttcaaccagccaaacttttcagcagttgcaacacatgcgtcttctcttcttaatcctgatgtattgaggttggcctctctactactgccacttcaaaaccctaatccagtttacccatcgaacctcgaccaaaatcttcaaactccaaatacatcatcagaatcgtctcaaccacaagctgagactagtacagtcccaacaaactatgaaacttcatcattggagcctatgaacgcaagactcgacgacgttggtcttgcagatgtattaccacctttgtcagagagttttgacttagactcgctcatgtcaacgccaatgtcttctccacgacaaaatagcattgaagcagaaaccaactccagcactttcttcgactttggaattccggaagatttcatcttagatgactttatgttttaa

SEQ ID NO: 16 - DNA, 3220 bp, synthetic construct
  misc_feature 1..3220: note = proFACT::MYB41 expression cassette
  source 1..3220: mol_type = other DNA
ggttaagagtttcgttttccttcgttcaaaatctaatgtgaaggaaagcaaaactgacacaacttttgtgtgaaccagagcaagtgaaagtgtgtcgaatctgtacttttgtactgtgtaatctctatagtctgactctcattatgtagttttaagtgtcttttacttgtgtagctgttacctgttacctgttaggttttctaatccttgttttatttgatagccagatactttagggaattttacttcttcttttcttgggtttaatttaagacatattcgtatatttcatttaattctgttatctgatttgtgagatcatgaaaacgaatgttgaacttgaaacttgagtgggttcagaaaaactactctgtattaaaaatcccagtgtcacatgataatgatccttcagtaaaggtagacatagcttttttgcagtgtgatatgcacaaatacaatctatatttttatgtaaaagatatatttctttgaaagtacttataaaaatatgtttttcataaaaaaaattatatgtaattctgaaagtatgtgatatgcacaagcacaacctatatttcctacattcaaattcgggtttttcttgacgccaagttacattcaattatcaataatagggctagttcaactaatgctatttatttatacaatccacccactactaaatctcaatctccaaggatctttatatattaataagaaaagctactatccaaatgcgaccttgttcgtgaagtgtttggtttataatttggtggcttaagactatagcccaccattgacccaaaaaaagaaaggaaaattaatagtagactatatagctaccaactccctataatttaccttgaaattaaaccagctttgtatttttttaatagaagtcagggctctacagtttcattttaaacttttttttttgttatattacatcctgcaggttagttgtaatttgtaaacgtaatcaacataataaaaccatttacatagactgattaaagttgattccatttgataatatttagctatttatatatcaatcaaccaccagctcttaaatatatgtattcaaattgttttgttgactctttttgctacactttaaatttgaatctagaatgttgtcctgaaacaaaaatctgtggattgaacaaaattatacaccaggtaaaattttgaagtttttaaaagcaggatcacatactcctaattttagattggatagatctagtataaaaatatgaagtttttttcccaaaaaataataataccatttagctcttaattaaatgcatgcaaactaaagataaaaagaggaattattttaaccattctaactcgtcacaacatgcctaatcattccaggttaattttagagttttcaaatcgtcatattaacatgtgatcctgaagactcttctcttctttcttctaccattagctgaaatctttacttgtaccacaattaacctcaaaccctagcccctaaatccccctagaaatcaatccatcctcagttctccaaaaagatatctttggtttttcttcactgacaaaacccctaaaaacaagtttgtacaaaaaagcaggctccatgggaagatcaccttgttgtgataaaaatggagtgaagaagggaccatggactgctgaggaggatcagaaactcatcgattatattcgatttcatggtcctggcaattggcgtacgctccccaaaaatgctggtacgtataaactacacaccgttccttatattttgttctcatagattaatatatatgttctctatttattgagtcacacacttataagtcgtattgtacaaattaaaggactccatagatgtggaaaaagctgccgtcttcgatggaccaattatctaagaccggacatcaagagaggaagattctcgttcgaggaagaagaaactatcattcagctacacagtgttatgggaaacaagtaagcctgatcattcacaccataatttttgtctgaaattcatattcatcagctacatgcttttgtatgttaattaatgtaaaactcaaaaagggagagtgtacgtttgcatgcgggggtacatgtcaaatgtaggccatcaactccaataaactattattagtactttactagtacgtattgacctatattagaataataataaaggagttttgtattgatcatagattaatgtcactaatattgaattgatgaatattaggtggtcagcaatagccgctcgtctaccagggaggaccgataacgaaataaaaaaccattggaacactcacatccgcaagagacttgtaaggagtggtatcgaccctgttactcattctccacgccttgatcttcttgatttgtcctcacttttgagtgcacttttcaaccagccaaacttttcagcagttgcaacacatgcgtcttctcttcttaatcctgatgtattgaggttggcctctctactactgccacttcaaaaccctaatccagtttacccatcgaacctcgaccaaaatcttcaaactccaaatacatcatcagaatcgtctcaaccacaagctgagactagtacagtcccaacaaactatgaaacttcatcattggagcctatgaacgcaagactcgacgacgttggtcttgcagatgtattaccacctttgtcagagagttttgacttagactcgctcatgtcaacgccaatgtcttctccacgacaaaatagcattgaagcagaaaccaactccagcactttcttcgactttggaattccggaagatttcatcttagatgactttatgtttgacccagctttcttgtacaaagtggcctaattttcaacatttgcatacacatgtcttgctttcacacatatgattctttgttgcattctttcttttgtttgatgtataaatttcttgtttttattctctcaaaagatattaagttattagtctataaaattttcatgaatgtttatgtattatctgcttaggcgagatatctaaattctgctccattagtccatatacacagttgacggaagcaaacatagaattattagcgtcaaacacatcacatattcatattgctttgttcgaatcatcgtcaatcaagttaatcagtttatgcgagttctatcatttaggcccaattcaaggcccaattcaagttcattttaaagccgttaatttggcca

SEQ ID NO: 17 - DNA, 3720 bp, synthetic construct
  misc_feature 1..3720: note = proHORST::MYB41 expression cassette
  source 1..3720: mol_type = other DNA
catctacaaagcctataaaatggaaagatgtatgcatcgatgatgattctgcctcacttagaagaatcaaaaagctaaaaggagctgcgaatcctgggcaacgatgacttagtatgtatagaagaaaaaaaaagcttttacttggtatcaaacagagcatgtgttgttgtatttgctacctttttctgcaaagttattggcaattgtattgttgttccacttgtatatatacagagaccatttatgttaatatacaacttcgtatggggaaagatgattccatcaagtccaaaatgccaaaaccatgcacgatcttgtctgatcaagtatgataagatgtgagattttaagaacgtgaagcttttcatattgtattctcaatgaacgaagaattaataattagagttagaaatgcagattacagagattacacaatttgatctcatttcttggcaaagaggcccaggccaccgaagccaccgtccttctttggattcctgtgtgttaattttcgtgtggctttagttacaaagggattatattgtcagcgaatctgagccgttggatcgttttgacatgagctttccataagtgtcttatcctttgtttctctcatttttcacatatgtatcagacatttaatcaagcacatatctacgtgttgattatgttgatgatgctgagattatgttgatttagagaatgagtattggtgatgatggtacacgttagtaaacatatgaatttggaagtgccacgtgagagggagcagagttttgggctttcttttggttatgtatttgcattcttgttgtaacaaattctcttattaaaagcattgtgaaaaaaaccaaataccacatagtctatgtttcaagatttgttttttaatactataattttctattactttagtttgtgtaatttttgaaaagagaaaattggtattttttaggattgggtgatctgaaatttgactacaaaaattttcttggacacagacacacagtcacacaaataagctaattattggaattttatcttaagttgcattcactttgcaaattaatattgaattatagactattagtgtatggcgtgatggcaaacaaaaaaatcagtgtgtgatattgtggactagccaaaaaaattttctgatgatttttttgcctaaataatttgaattgttgagaccgaaactcttactaatatactaacaatgtaacgcgacaaataaaacattgttgagaataaaatctgaaccatcataactatagtctatagtaaccgtccgaattcaaccacatatgtatgatctttgccatttttgatcatattttccgttgcgttttctttgaattttctcaatatatttttagtgttttgatttgtacttttatctaatttatataattgtttttcaaatgtttcgcaattgtgcgtttaagtattcgactcgaagtaaacccagtttcttagaatgggctaactgccattgaccaaatctttatccgcgaagaaagatctttagcagctaggcttatttcatatcaacaaaagtatatatttatctctaactaaattcctacaattatttcaaaaacatagaaattaaaatttgaaatgcctattcttttttggttatacattgcaaaggttatgtatgtaatttctgatcttgaaatttaagttctttagcccatatctagttgattttcacgaaatattgtcgtttactctcgtttttatatataaagcatgtacatataacatataatcaatgcttcaaaagaaaaaaataatcataactaaattgaaacgggaaaactaatttgctttcgtgttctattatgccaaactgtactcacaatagtcttatcctatcgacccaaatttaatcttcccaactacttactcctaattgaaacaaaatataacctttcttactatagcctatatttaaaaaatatctatgatttctacatttatatatatacgcacacggcacatacctctcattcaccatatatgcctcttaacaatctctccacagaacaaaagcaaaaagcctaaaccgggatagcaagtttgtacaaaaaagcaggctccatgggaagatcaccttgttgtgataaaaatggagtgaagaagggaccatggactgctgaggaggatcagaaactcatcgattatattcgatttcatggtcctggcaattggcgtacgctccccaaaaatgctggtacgtataaactacacaccgttccttatattttgttctcatagattaatatatatgttctctatttattgagtcacacacttataagtcgtattgtacaaattaaaggactccatagatgtggaaaaagctgccgtcttcgatggaccaattatctaagaccggacatcaagagaggaagattctcgttcgaggaagaagaaactatcattcagctacacagtgttatgggaaacaagtaagcctgatcattcacaccataatttttgtctgaaattcatattcatcagctacatgcttttgtatgttaattaatgtaaaactcaaaaagggagagtgtacgtttgcatgcgggggtacatgtcaaatgtaggccatcaactccaataaactattattagtactttactagtacgtattgacctatattagaataataataaaggagttttgtattgatcatagattaatgtcactaatattgaattgatgaatattaggtggtcagcaatagccgctcgtctaccagggaggaccgataacgaaataaaaaaccattggaacactcacatccgcaagagacttgtaaggagtggtatcgaccctgttactcattctccacgccttgatcttcttgatttgtcctcacttttgagtgcacttttcaaccagccaaacttttcagcagttgcaacacatgcgtcttctcttcttaatcctgatgtattgaggttggcctctctactactgccacttcaaaaccctaatccagtttacccatcgaacctcgaccaaaatcttcaaactccaaatacatcatcagaatcgtctcaaccacaagctgagactagtacagtcccaacaaactatgaaacttcatcattggagcctatgaacgcaagactcgacgacgttggtcttgcagatgtattaccacctttgtcagagagttttgacttagactcgctcatgtcaacgccaatgtcttctccacgacaaaatagcattgaagcagaaaccaactccagcactttcttcgactttggaattccggaagatttcatcttagatgactttatgtttgacccagctttcttgtacaaagtggcctaattttcaacatttgcatacacatgtcttgctttcacacatatgattctttgttgcattctttcttttgtttgatgtataaatttcttgtttttattctctcaaaagatattaagttattagtctataaaattttcatgaatgtttatgtattatctgcttaggcgagatatctaaattctgctccattagtccatatacacagttgacggaagcaaacatagaattattagcgtcaaacacatcacatattcatattgctttgttcgaatcatcgtcaatcaagttaatcagtttatgcgagttctatcatttaggcccaattcaaggcccaattcaagttcattttaaagccgttaatttggcca

SEQ ID NO: 18 - DNA, 3648 bp, synthetic construct
  misc_feature 1..3648: note = proASFT::MYB41 expression cassette
  source 1..3648: mol_type = other DNA
agctcaaacctttaaatggcttttaattagatatatttagcgagaatgtgattgctagtgaaatctcaaacttgatagcttattcatagcttattttacttcgatcagcaagagaacaatggttcctaaagctcaaaccttttttggcgtttgctttagattgtgcatacataaagtgagaagatgaaatatggttttgctgaaatctcaatgtgctcattcatagtttattttgctcgacctttctttaatcaatagctttgatgtactgattactttataaagttaagaagtaagttctgctctttaaactgtactgaatggaggcttctctgcataattaagcaaacactctgatgattgagtttcgttgtacaaaggaaagtttttgccttagttagaaattcatcttgtttctttgcccagaagctggcttgctgatagaatttggactacgctacgttttcttgggtgaaaaacaatccgcgtccttccacgagaacagtgaaactgtacgatgttcttattgtattgtgtcaacagcccataatcaatgaaatgggcctcaatgacagtataagccgaaaaatattcgaatgcgatctagaactaatctgaaaccaaacttctcaaatcattaacatttgattagggcctaaaagtccatccgtattttaaaaaaaagttgataacaaatgcaaaaatacaaatatacattactattaaaactcaatctttctgattatatgtggatggagaagctgttttgcagtgtggatttgaattttgaagttcttgttcaaaaaagaaaagaaacttggtcaagcttcaaaagaaagaaagaaataaagacaagtatacaaatacgttgacttcaattaatatgaagatagaagagaaagatatagaaatgcgttttaaattggcggtgggagatatgtgattcccttggtcccgctttctcgtttgattcggtaacctaaaccttctccatccaagaagacacaaacaaggaagaaattaacctacgtacgtacatcatttgaactacttatatctattataaatggaaaatctattttcttcttctctctcttttaaccgaaaaaggaaaagtcctcgaaataactctttaatataattcatgtggaaaccttctatatattttttgcatgcttttttgaaattaagtaatggcatactaattagaagaagacgaaaaataatatgtctaagtaattgagtttcgtggtcaaggcaaatcaagattgcattctttaattaagtgtacaaattatgatgtaagaaccgttatttggcataacctaatatatattaaaaactgattttttttttttttaacttctgtaagaaatggttttcttaattaccaatcatgatctattattgtaaaatgtgtaattttgtgttgcgattgaagtgttcttagataaagatatgtcatatgcatgatatcatctatttgattttgagaaaataaaaacataacatgagaacatcgtagagagtaagatacatgacaaagagaaagaataagctaagaagtcatccaaaaattgggaggcctactctcaactaccaaaaatacaagtgtttgttgtgttaggtcatttattcagtcacctaaccctaactatatgaaatacgttaaaattcatatatagaaaaataaagaagaaatactattagtcaatataattttttttaacaaaataaaaataaagaaagaaacactattagtcaatgaattaaaaaaaaaaaaatccatctttcgatcaagaccgtccaagtattctcctttcacataactcttacgttttacactaaacaagacgagatttttatgagcttgtggctcccacaacaatcctcattgatttctccatatatatcacatgagaatccaactcgacttcatactaacattcatcccaaaagttccattctttttcacaaagccattgtgctgttttctccatttggatcaaagcaagtttgtacaaaaaagcaggctccatgggaagatcaccttgttgtgataaaaatggagtgaagaagggaccatggactgctgaggaggatcagaaactcatcgattatattcgatttcatggtcctggcaattggcgtacgctccccaaaaatgctggtacgtataaactacacaccgttccttatattttgttctcatagattaatatatatgttctctatttattgagtcacacacttataagtcgtattgtacaaattaaaggactccatagatgtggaaaaagctgccgtcttcgatggaccaattatctaagaccggacatcaagagaggaagattctcgttcgaggaagaagaaactatcattcagctacacagtgttatgggaaacaagtaagcctgatcattcacaccataatttttgtctgaaattcatattcatcagctacatgcttttgtatgttaattaatgtaaaactcaaaaagggagagtgtacgtttgcatgcgggggtacatgtcaaatgtaggccatcaactccaataaactattattagtactttactagtacgtattgacctatattagaataataataaaggagttttgtattgatcatagattaatgtcactaatattgaattgatgaatattaggtggtcagcaatagccgctcgtctaccagggaggaccgataacgaaataaaaaaccattggaacactcacatccgcaagagacttgtaaggagtggtatcgaccctgttactcattctccacgccttgatcttcttgatttgtcctcacttttgagtgcacttttcaaccagccaaacttttcagcagttgcaacacatgcgtcttctcttcttaatcctgatgtattgaggttggcctctctactactgccacttcaaaaccctaatccagtttacccatcgaacctcgaccaaaatcttcaaactccaaatacatcatcagaatcgtctcaaccacaagctgagactagtacagtcccaacaaactatgaaacttcatcattggagcctatgaacgcaagactcgacgacgttggtcttgcagatgtattaccacctttgtcagagagttttgacttagactcgctcatgtcaacgccaatgtcttctccacgacaaaatagcattgaagcagaaaccaactccagcactttcttcgactttggaattccggaagatttcatcttagatgactttatgtttgacccagctttcttgtacaaagtggcctaattttcaacatttgcatacacatgtcttgctttcacacatatgattctttgttgcattctttcttttgtttgatgtataaatttcttgtttttattctctcaaaagatattaagttattagtctataaaattttcatgaatgtttatgtattatctgcttaggcgagatatctaaattctgctccattagtccatatacacagttgacggaagcaaacatagaattattagcgtcaaacacatcacatattcatattgctttgttcgaatcatcgtcaatcaagttaatcagtttatgcgagttctatcatttaggcccaattcaaggcccaattcaagttcattttaaagccgttaatttggcca

SEQ ID NO: 19 - DNA, 3784 bp, synthetic construct
  misc_feature 1..3784: note = proGPAT5::MYB41 expression cassette
  source 1..3784: mol_type = other DNA
tgatcgcaaacgtcaatggtctatatccatctcttggggatacaccattcagatatacacttacttcttgactgctacggagctgactacgccgttgcagaccttcaaaacttggcggtcttccagcgatggacctttcgtgtttaacactcggcccttgaaacctgacccctgtgagcgtccggtcacttatttcatggatggtgccgaggatgtacgggatagtgggacgaaaacttggtatagcataggggataagaactatggtcattgcggaaagattgagcatactcgattaactaaagtgaagaggatattggtgacttcaatgaagacggatcctgagtattggaacaaggtacttagtgtttgtatatttctcatattgaatttaacattttgggtgagtttaggttacatctttttttttattttttgcttttgttgataggcaccgaggagacagtgttgtgaggtgatggaaggaaaagtaggaaaaagaaaagagaaagaaatgttgttaaggattagaaaatgcagatctttggagaagatataaaaaaagcgttttaattagagagatttttgcacatacagatttagattcgatcattagttatttgtttctaaattcctcaattcctagtaccaagagaatgacgattttctctagtaatactggcactcttcgtttttcaacatgtaaacattactttgtataattagtctatatcaaataaatagttacaacatgaacgtaactatttatacacgagggtaaatttttaacaaatttaaaccgaaccaaaaagatttcagttaatcatagttttgttacaagcgaaatctgaaatattcaccctcaagtttgttacgtaattgtctaatctgtgtttttttgtgctagtgttataattgtttcctcgaatgttaagcaccacatagaagtatacacttttcttttattattttcgttcttcttccatttagaaacttttattaattctactgttaaatccaacgttattagtttattttctctgatgaagttctaattttttttgtttgttggaaaaagggttacttttctgatgaagttgccgatttgtttccaaccaaacctcagctaatatagttagggagacggataagaaattgcataaagggagaggctttgtaaacacgcaagtttacgtcaacttgacacatataaactcgtatataggaattgtgtaaaatgttaatcaatatatgtttatgaatatagtccttttatttccttaatctatagtcatgttatcatcatatcggcaagaaaattactattacaacatatgtttccgtgcttcgatttgtcgatcaggtaggcaaccaaaccgggccagattagtcacaaatgaaattaggctccactttggcaagttttttcacaattaaaaattagaaagtctaaccaaactaatagaaactgaaccaaacaaaaatgttcacgcaattacgtagcacttctctatgaaatactgtggataattcgatttgagctaatctatggtaagtcgtttctctcaaactgaattaagctaaaccaaaccgaaaataaaccgttgtagaacacccataataaacatatatatgttctctactcttatttggctatttttccatttgcagatacgtgtgacaacattccaaatataggcacatgatacaaattacaaagccagaaattataatttataaactatacataataaggtcagtagcctaattacatccatatatttagttgggcataataaggatagcctaattttggtgcatcccgccaaaaattcggacaaatggtgaatttcaaaccatgaatttctttgttatacatacattacgtgcactattacatcaaagaaaaatagtgacgtgcataaacgtattttcttcacataatctatatataatatatacagccatgtacatttttcaacatagaaaaatcatgtatacaaatacggtaggtgcaatactgataaactgccattcccattgcattagacgctagtcaatccaaaccttataacataaaaagttatagtccatttctttcatatccaatcgagtcaaaataatattcgagcaaaaaacaaaagaagcaagtttgtacaaaaaagcaggctccatgggaagatcaccttgttgtgataaaaatggagtgaagaagggaccatggactgctgaggaggatcagaaactcatcgattatattcgatttcatggtcctggcaattggcgtacgctccccaaaaatgctggtacgtataaactacacaccgttccttatattttgttctcatagattaatatatatgttctctatttattgagtcacacacttataagtcgtattgtacaaattaaaggactccatagatgtggaaaaagctgccgtcttcgatggaccaattatctaagaccggacatcaagagaggaagattctcgttcgaggaagaagaaactatcattcagctacacagtgttatgggaaacaagtaagcctgatcattcacaccataatttttgtctgaaattcatattcatcagctacatgcttttgtatgttaattaatgtaaaactcaaaaagggagagtgtacgtttgcatgcgggggtacatgtcaaatgtaggccatcaactccaataaactattattagtactttactagtacgtattgacctatattagaataataataaaggagttttgtattgatcatagattaatgtcactaatattgaattgatgaatattaggtggtcagcaatagccgctcgtctaccagggaggaccgataacgaaataaaaaaccattggaacactcacatccgcaagagacttgtaaggagtggtatcgaccctgttactcattctccacgccttgatcttcttgatttgtcctcacttttgagtgcacttttcaaccagccaaacttttcagcagttgcaacacatgcgtcttctcttcttaatcctgatgtattgaggttggcctctctactactgccacttcaaaaccctaatccagtttacccatcgaacctcgaccaaaatcttcaaactccaaatacatcatcagaatcgtctcaaccacaagctgagactagtacagtcccaacaaactatgaaacttcatcattggagcctatgaacgcaagactcgacgacgttggtcttgcagatgtattaccacctttgtcagagagttttgacttagactcgctcatgtcaacgccaatgtcttctccacgacaaaatagcattgaagcagaaaccaactccagcactttcttcgactttggaattccggaagatttcatcttagatgactttatgtttgacccagctttcttgtacaaagtggcctaattttcaacatttgcatacacatgtcttgctttcacacatatgattctttgttgcattctttcttttgtttgatgtataaatttcttgtttttattctctcaaaagatattaagttattagtctataaaattttcatgaatgtttatgtattatctgcttaggcgagatatctaaattctgctccattagtccatatacacagttgacggaagcaaacatagaattattagcgtcaaacacatcacatattcatattgctttgttcgaatcatcgtcaatcaagttaatcagtttatgcgagttctatcatttaggcccaattcaaggcccaattcaagttcattttaaagccgttaatttggcca

SEQ ID NO: 20 - DNA, 3287 bp, synthetic construct
  misc_feature 1..3287: note = proRALPH::MYB41 expression cassette
  source 1..3287: mol_type = other DNA
ctttcctctgaaacgattctccacgctctttgtttataaggattgcaagaaattactgaagaacatcaggaatcgcgagagcttggggcgaatcaaaaacctccattgatgaagaagactgcatctagtactttacttactcggtagcacacctccatgggcaggctccagcaccatggttgggcccatttcttattaatgggcctaaaatagagcttctagggcctctatatattttgtcttttctcttccgtttaggcgttttgctaactttcttacgtatatgaatgtgaattatagttagttaactttagaactgttgagcggccaatgccacgtcctttgtacgtaaattatgttattcatgctattatttatgtaccaattttctattctaatatatattctaagttttttttgtatcaatactaagtatttatacaatttttgcaaattttgacagaaagatagtacaaaaaatatgaaagaccaaaaactacataaaccaccaaaaattacaacacaaacagaaaacggaaagaaaactcaatcgaaaactctacaagtagagaccttaaaagaaacttagattccaaaccacaaagctcaaatatttgtgtggtttcctcaacttaaaagatctcaaatacttatagttgttgccactagcaatccaaacctaggccagttttcaaaatctctaaaaaagagcttaccattccaaacttaggacaatcctcataatattttaaattttatgacattttttagttttttcttaccgaacatagagatacaacgaataacacaaaataccaaattttactaaacaaacaattactgcacaaatgaaaaagtaatcaacaacatgagctcatttcacgaaaaaagaagcgaaaaagccaacggtcttgccacaaattagtatattgcaaattacaaatgcttaaaaaaattcacagatatattcatcaattataccttttgattatcttgcaaataaatcttccaattcatattacctacgtcaaaatttagccatctacccttattatcccattatgaaaatttcaaaatcgataagatgacagacacccaacaacgaattatcattttatatactataggtattagatacctacaatttatttggtttattgggaatatacgattcataaattccctcataaaaatataaagcaaatgtggacggaagcaaaaaaactaaatatagaatggagagaaattgtattattaacttaggttacccatcgccaacaacctctcatttcctttcctaaactatttcacaattttggtcaaaaacacaatctaaccccaaaaaagattcgacctttgaaattcccaaaaccagaagcaaaacccccaaaagaaccctacttatagtgaaagaaaagtaacataataatatatatacacgagaaccaagagccacttgaatataaagttcacagtttttgtctgctcaccaaatcaaaccaatttctcctgatagccaaagtttttgtccccaacaagaaactcatgcaacattcttcacccactagctaactaacgacttccattcttattaatctctctcaattcttcatttctgagattcatcgctctctcttctctttgtcacagcaagtttgtacaaaaaagcaggctccatgggaagatcaccttgttgtgataaaaatggagtgaagaagggaccatggactgctgaggaggatcagaaactcatcgattatattcgatttcatggtcctggcaattggcgtacgctccccaaaaatgctggtacgtataaactacacaccgttccttatattttgttctcatagattaatatatatgttctctatttattgagtcacacacttataagtcgtattgtacaaattaaaggactccatagatgtggaaaaagctgccgtcttcgatggaccaattatctaagaccggacatcaagagaggaagattctcgttcgaggaagaagaaactatcattcagctacacagtgttatgggaaacaagtaagcctgatcattcacaccataatttttgtctgaaattcatattcatcagctacatgcttttgtatgttaattaatgtaaaactcaaaaagggagagtgtacgtttgcatgcgggggtacatgtcaaatgtaggccatcaactccaataaactattattagtactttactagtacgtattgacctatattagaataataataaaggagttttgtattgatcatagattaatgtcactaatattgaattgatgaatattaggtggtcagcaatagccgctcgtctaccagggaggaccgataacgaaataaaaaaccattggaacactcacatccgcaagagacttgtaaggagtggtatcgaccctgttactcattctccacgccttgatcttcttgatttgtcctcacttttgagtgcacttttcaaccagccaaacttttcagcagttgcaacacatgcgtcttctcttcttaatcctgatgtattgaggttggcctctctactactgccacttcaaaaccctaatccagtttacccatcgaacctcgaccaaaatcttcaaactccaaatacatcatcagaatcgtctcaaccacaagctgagactagtacagtcccaacaaactatgaaacttcatcattggagcctatgaacgcaagactcgacgacgttggtcttgcagatgtattaccacctttgtcagagagttttgacttagactcgctcatgtcaacgccaatgtcttctccacgacaaaatagcattgaagcagaaaccaactccagcactttcttcgactttggaattccggaagatttcatcttagatgactttatgtttgacccagctttcttgtacaaagtggcctaattttcaacatttgcatacacatgtcttgctttcacacatatgattctttgttgcattctttcttttgtttgatgtataaatttcttgtttttattctctcaaaagatattaagttattagtctataaaattttcatgaatgtttatgtattatctgcttaggcgagatatctaaattctgctccattagtccatatacacagttgacggaagcaaacatagaattattagcgtcaaacacatcacatattcatattgctttgttcgaatcatcgtcaatcaagttaatcagtttatgcgagttctatcatttaggcccaattcaaggcccaattcaagttcattttaaagccgttaatttggcca

SEQ ID NO: 21 - DNA, 3885 bp, synthetic construct
  misc_feature 1..3885: note = proMYB84::MYB41 expression cassette
  source 1..3885: mol_type = other DNA
tctgagacatcattgatatctaacaatcaaaaactaaaaagtgaagtattaacattttaatcagattcaaaccagaacttatcagtcatcaaaaatgttggcaaataacaaatcaaacttaagtttttggatggagaaagcaagctagattcgaatctctaagaagcgtggacttggacttgtttacgacctgaaaagatgtcatgattatctcatgattacgagataataacatgtcttatctactaaactaatctaaaaagtagtgaggatgacttgaaacttaagtcttatatgaattatctttaaatatagaaaaagaaaggagatagagaggtgtgtttttcatgtgaacaacttttttttacctttagagtacttccagaagacttattgggtccttaataaaagtagaccaaattattgaagagctaaaaaaaaatgcctactcaaaatatccaaacctcttcttttagccttttgtttttttcaatattcatactaatgtaaactacaatcattgtatcattctataatcatatgaattttttgtcaacaccatgcattatgctagtttaaatttaggtgatgatataaagatattttaagtacaaatcaataggggcgatgttcttatgtctttatctaactttatgaatttgtgttttatatattatgaaaaattggaaaagaagagatggcctacgctcaagaccaattcctaccaatgggcaatggtgttgaaatctgaacaaaaaaatttcctttctttaacgttagctttaaagttcaaaaaactttatttactttttcagtgataattctgtataaaataacatataacaatgaggaaaaaactcaataatttgaatcgcttatgactttatttctccaagtgcttgacttttaaaaccctaatgtccaatctcaactaaagtcaacctttttcgttcgtctagaagagtcagtcattaagtttcaattgaagtatacagtaaattattagtactttttattttattttaaccacagttcattggctgtatgagatttctgttcaagaaaacatataaatcgaaaccaaagcaaaagacattatttgcttcggtttcttctactcaagctcatttttagtaaaactaaattgtattttcattttcttaaaaagttaattgttttttttgtaaaatcagttttaccaaattggacacaataatgaatatatgtctatgtctagttttttttagctcagaatatatcttatgtgaatagaatcgtctatcagatatttttgtgatgcagatagaacttaccgttatagaatcatttgtagattgttcatcgtgattgttaagattagattcccatttgtaatataacagaaactcgaaaagtacttatattaagtattaacgatgtatcatgtgaccaaaatagaaaatactacgtaatgatatgattattaagcgagtgtgtaggtaattcaaatatttcaattaatcaatctttgatatcactctttagagtaatgtattatctttcttattgttttaccctgggattaataagtttaccggatccggagtagaatttcttcggtttggcaattttgttcacctaccataacgaacttttacccttatacttagtttcaatctacttttggtgcatcctttcattttcaactgcaaagaagtagttaaaagatccaatacataatatatttaatttatcataagtaacttagtgtaaagaaagactaaagtactttttaaaatatgtatttgtatttcccgatgtgaaagaaaagaaaattgaatttgcacatatcaataatattagctaggaaaaaacttgtgagaaatttctttgacgacttgcgtgtgcaatagtcttccttatcttctctaccatttcttaattccactattgtatagtatttacttatgttgaattaataaattaaaacatttaaatttccctaaagttactttttgatttttgattttctatttttattacaactttcctactttttgacatcttttcttacaaagactttttgacatctccccctccagctattatatagtctccttttttcttttctgcattcacataatatttcccctatatagtttacacaacatcatacccaccaacatatataatcttgatcatagagagataaacagaggccgctatcaagaacaagactaagaacaagacttcactaggagtacaagtgcaagtttgtacaaaaaagcaggctccatgggaagatcaccttgttgtgataaaaatggagtgaagaagggaccatggactgctgaggaggatcagaaactcatcgattatattcgatttcatggtcctggcaattggcgtacgctccccaaaaatgctggtacgtataaactacacaccgttccttatattttgttctcatagattaatatatatgttctctatttattgagtcacacacttataagtcgtattgtacaaattaaaggactccatagatgtggaaaaagctgccgtcttcgatggaccaattatctaagaccggacatcaagagaggaagattctcgttcgaggaagaagaaactatcattcagctacacagtgttatgggaaacaagtaagcctgatcattcacaccataatttttgtctgaaattcatattcatcagctacatgcttttgtatgttaattaatgtaaaactcaaaaagggagagtgtacgtttgcatgcgggggtacatgtcaaatgtaggccatcaactccaataaactattattagtactttactagtacgtattgacctatattagaataataataaaggagttttgtattgatcatagattaatgtcactaatattgaattgatgaatattaggtggtcagcaatagccgctcgtctaccagggaggaccgataacgaaataaaaaaccattggaacactcacatccgcaagagacttgtaaggagtggtatcgaccctgttactcattctccacgccttgatcttcttgatttgtcctcacttttgagtgcacttttcaaccagccaaacttttcagcagttgcaacacatgcgtcttctcttcttaatcctgatgtattgaggttggcctctctactactgccacttcaaaaccctaatccagtttacccatcgaacctcgaccaaaatcttcaaactccaaatacatcatcagaatcgtctcaaccacaagctgagactagtacagtcccaacaaactatgaaacttcatcattggagcctatgaacgcaagactcgacgacgttggtcttgcagatgtattaccacctttgtcagagagttttgacttagactcgctcatgtcaacgccaatgtcttctccacgacaaaatagcattgaagcagaaaccaactccagcactttcttcgactttggaattccggaagatttcatcttagatgactttatgtttgacccagctttcttgtacaaagtggcctaattttcaacatttgcatacacatgtcttgctttcacacatatgattctttgttgcattctttcttttgtttgatgtataaatttcttgtttttattctctcaaaagatattaagttattagtctataaaattttcatgaatgtttatgtattatctgcttaggcgagatatctaaattctgctccattagtccatatacacagttgacggaagcaaacatagaattattagcgtcaaacacatcacatattcatattgctttgttcgaatcatcgtcaatcaagttaatcagtttatgcgagttctatcatttaggcccaattcaaggcccaattcaagttcattttaaagccgttaatttggcca

SEQ ID NO: 22 - protein, 365 aa, Arabidopsis thaliana
MGRSPCCDENGLKKGPWTPEEDQKLIDYIHKHGHGSWRALPKLADLNRCGKSCRLRWTNYLRPDIKRGKFSAEEEQTILHLHSILGNKWSAIATHLQGRTDNEIKNFWNTHLKKKLIQMGIDPVTHQPRTDLFASLPQLIALANLKDLIEQTSQFSSMQGEAAQLANLQYLQRMFNSSASLTNNNGNNFSPSSILDIDQHHAMNLLNSMVSWNKDQNPAFDPVLELEANDQNQDLFPLGFIIDQPTQPLQQQKYHLNNSPSELPSQGDPLLDHVPFSLQTPLNSEDHFIDNLVKHPTDHEHEHDDNPSSWVLPSLIDNNPKTVTSSLPHNNPADASSSSSYGGCEAASFYWPDICFDESLMNVIS

SEQ ID NO: 23 - protein, 333 aa, Arabidopsis thaliana
MVRTPCCRAEGLKKGAWTQEEDQKLIAYVQRHGEGGWRTLPDKAGLKRCGKSCRLRWANYLRPDIKRGEFSQDEEDSIINLHAIHGNKWSAIARKIPRRTDNEIKNHWNTHIKKCLVKKGIDPLTHKSLLDGAGKSSDHSAHPEKSSVHDDKDDQNSNNKKLSGSSSARFLNRVANRFGHRINHNVLSDIIGSNGLLTSHTTPTTSVSEGERSTSSSSTHTSSNLPINRSITVDATSLSSSTFSDSPDPCLYEEIVGDIEDMTRFSSRCLSHVLSHEDLLMSVESCLENTSFMREITMIFQEDKIETTSFNDSYVTPINEVDDSCEGIDNYFG

SEQ ID NO: 24 - protein, 321 aa, Arabidopsis thaliana
MGRSPCCDESGLKKGPWTPEEDQKLINHIRKHGHGSWRALPKQAGLNRCGKSCRLRWTNYLRPDIKRGNFTAEEEQTIINLHSLLGNKWSSIAGHLPGRTDNEIKNYWNTHIRKKLIQMGIDPVTHRPRTDHLNVLAALPQLLAAANFNNLLNLNQNIQLDATSVAKAQLLHSMIQVLSNNNTSSSFDIHHTTNNLFGQSSFLENLPNIENPYDQTQGLSHIDDQPLDSFSSPIRVVAYQHDQNFIPPLISTSPDESKETQMMVKNKEIMKYNDHTSNPSSTSTFTQDHQPWCDIIDDEASDSYWKEIIEQTCSEPWPFRE

SEQ ID NO: 25 - protein, 307 aa, Arabidopsis thaliana
MREKWEMKRDEMGHRCCGKHKVKRGLWSPEEDEKLLRYITTHGHPSWSSVPKLAGLQRCGKSCRLRWINYLRPDLRRGSFNEEEEQIIIDVHRILGNKWAQIAKHLPGRTDNEVKNFWNSCIKKKLLSQGLDPSTHNLMPSHKRSSSSNNNNIPKPNKTTSIMKNPTDLDQSTTAFSITNINPPTSTKPNKLKSPNQTTIPSQTVIPINDNMSSTQTMIPINDPMSSLLDDENMIPHWSDVDGMAIHEAPMLPSDKAVVGVDDDDLNMDILFNTPSSSAFDPDFASIFSSAMSIDFNPMDDLGSWTF

SEQ ID NO: 26 - protein, 310 aa, Arabidopsis thaliana
MGRAPCCDKANVKKGPWSPEEDAKLKSYIENSGTGGNWIALPQKIGLKRCGKSCRLRWLNYLRPNIKHGGFSEEEENIICSLYLTIGSRWSIIAAQLPGRTDNDIKNYWNTRLKKKLINKQRKELQEACMEQQEMMVMMKRQHQQQQIQTSFMMRQDQTMFTWPLHHHNVQVPALFMNQTNSFCDQEDVKPVLIKNMVKIEDQELEKTNPHHHQDSMTNAFDHLSFSQLLLDPNHNHLGSGEGFSMNSILSANTNSPLLNTSNDNQWFGNFQAETVNLFSGASTSTSADQSTISWEDISSLVYSDSKQFF

SEQ ID NO: 27 - protein, 324 aa, Arabidopsis thaliana
MGRSPCCEKKNGLKKGPWTPEEDQKLIDYINIHGYGNWRTLPKNAGLQRCGKSCRLRWTNYLRPDIKRGRFSFEEEETIIQLHSIMGNKWSAIAARLPGRTDNEIKNYWNTHIRKRLLKMGIDPVTHTPRLDLLDISSILSSSIYNSSHHHHHHHQQHMNMSRLMMSDGNHQPLVNPEILKLATSLFSNQNHPNNTHENNTVNQTEVNQYQTGYNMPGNEELQSWFPIMDQFTNFQDLMPMKTTVQNSLSYDDDCSKSNFVLEPYYSDFASVLTTPSSSPTPLNSSSSTYINSSTCSTEDEKESYYSDNITNYSFDVNGFLQFQ

SEQ ID NO: 28 - protein, 236 aa, Arabidopsis thaliana
MGRSPCCEKAHTNKGAWTKEEDQRLVDYIRNHGEGCWRSLPKSAGLLRCGKSCRLRWINYLRPDLKRGNFTDDEDQIIIKLHSLLGNKWSLIAGRLPGRTDNEIKNYWNTHIKRKLLSHGIDPQTHRQINESKTVSSQVVVPIQNDAVEYSFSNLAVKPKTENSSDNGASTSGTTTDEDLRQNGECYYSDNSGHIKLNLDLTLGFGSWSGRIVGVGSSADSKPWCDPVMEARLSLL

SEQ ID NO: 29 - protein, 360 aa, Arabidopsis thaliana
MGRSPCCDQDKGVKKGPWLPEEDDKLTAYINENGYGNWRSLPKLAGLNRCGKSCRLRWMNYLRPDIRRGKFSDGEESTIVRLHALLGNKWSKIAGHLPGRTDNEIKNYWNTHMRKKLLQMGIDPVTHEPRTNDLSPILDVSQMLAAAINNGQFGNNNLLNNNTALEDILKLQLIHKMLQIITPKAIPNISSFKTNLLNPKPEPVVNSFNTNSVNPKPDPPAGLFINQSGITPEAASDFIPSYENVWDGFEDNQLPGLVTVSQESLNTAKPGTSTTTKVNDHIRTGMMPCYYGDQLLETPSTGSVSVSPETTSLNHPSTAQHSSGSDFLEDWEKFLDDETSDSCWKSFLDLTSPTSSPVPW

SEQ ID NO: 30 - protein, 350 aa, Arabidopsis thaliana
MARSPCCEKNGLKKGPWTSEEDQKLVDYIQKHGYGNWRTLPKNAGLQRCGKSCRLRWTNYLRPDIKRGRFSFEEEETIIQLHSFLGNKWSAIAARLPGRTDNEIKNFWNTHIRKKLLRMGIDPVTHSPRLDLLDISSILASSLYNSSSHHMNMSRLMMDTNRRHHQQHPLVNPEILKLATSLFSQNQNQNLVVDHDSRTQEKQTVYSQTGVNQYQTNQYFENTITQELQSSMPPFPNEARQFNNMDHHFNGFGEQNLVSTSTTSVQDCYNPSFNDYSSSNFVLDPSYSDQSFNFANSVLNTPSSSPSPTTLNSSYINSSSCSTEDEIESYCSNLMKFDIPDFLDVNGFII

SEQ ID NO: 31 - protein, 282 aa, Arabidopsis thaliana
MGRSPCCEKAHTNKGAWTKEEDERLVAYIKAHGEGCWRSLPKAAGLLRCGKSCRLRWINYLRPDLKRGNFTEEEDELIIKLHSLLGNKWSLIAGRLPGRTDNEIKNYWNTHIRRKLINRGIDPTSHRPIQESSASQDSKPTQLEPVTSNTINISFTSAPKVETFHESISFPGKSEKISMLTFKEEKDECPVQEKFPDLNLELRISLPDDVDRLQGHGKSTTPRCFKCSLGMINGMECRCGRMRCDVVGGSSKGSDMSNGFDFLGLAKKETTSLLGFRSLEMK

SEQ ID NO: 32 - protein, 334 aa, Arabidopsis thaliana
MGRSPISDDSGLKKGPWTPDEDEKLVNYVQKHGHSSWRALPKLAGLNRCGKSCRLRWTNYLRPDIKRGRFSPDEEQTILNLHSVLGNKWSTIANQLPGRTDNEIKNFWNTHLKKKLIQMGFDPMTHRPRTDIFSGLSQLMSLSSNLRGFVDLQQQFPIDQEHTILKLQTEMAKLQLFQYLLQPSSMSNNVNPNDFDTLSLLNSIASFKETSNNTTSNNLDLGFLGSYLQDFHSLPSLKTLNSNMEPSSVFPQNLDDNHFKFSTQRENLPVSPIWLSDPSSTTPAHVNDDLIFNQYGIEDVNSNITSSSGQESGASASAAWPDHLLDDSIFSDIP

SEQ ID NO: 33 - protein, 336 aa, Arabidopsis thaliana
MGRSPCCDENGLKKGPWTQEEDDKLIDHIQKHGHGSWRALPKQAGLNRCGKSCRLRWTNYLRPDIKRGNFTEEEEQTIINLHSLLGNKWSSIAGNLPGRTDNEIKNYWNTHLRKKLLQMGIDPVTHRPRTDHLNVLAALPQLIAAANFNSLLNLNQNVQLDATTLAKAQLLHTMIQVLSTNNNTTNPSFSSSTMQNSNTNLFGQASYLENQNLFGQSQNFSHILEDENLMVKTQIIDNPLDSFSSPIQPGFQDDHNSLPLLVPASPEESKETQRMIKNKDIVDYHHHDASNPSSSNSTFTQDHHHPWCDTIDDGASDSFWKEIIEQTCSEPWPFPE

SEQ ID NO: 34 - protein, 333 aa, Arabidopsis thaliana
MGRAPCCDKANVKKGPWSPEEDVKLKDYIDKYGTGGNWIALPQKIGLKRCGKSCRLRWLNYLRPNIKHGGFSEEEDRIILSLYISIGSRWSIIAAQLPGRTDNDIKNYWNTKLKKKLLGRQKQMNRQDSITDSTENNLSNNNNNKSPQNLSNSALERLQLHMQLQNLQSPFSSFYNNPILWPKLHPLLQSTTTNQNPKLASQESFHPLGVNVDHQHNNTKLAQINNGASSLYSENVEQSQNPAHEFQPNFGFSQDLRLDNHNMDFMNRGVSKELFQVGNEFELTNGSSWWSEEVELERKTTSSSSWGSASVLDQTTEGMVMLQDYAQMSYHSV

SEQ ID NO: 35 - protein, 310 aa, Arabidopsis thaliana
MGRSPSSDETGLKKGPWLPEEDDKLINYIHKHGHSSWSALPKLAGLNRCGKSCRLRWTNYLRPDIKRGKFSAEEEETILNLHAVLGNKWSMIASHLPGRTDNEIKNFWNTHLKKKLIQMGFDPMTHQPRTDDIFSSLSQLMSLSNLRGLVDLQQQFPMEDQALLNLQTEMAKLQLFQYLLQPSPAPMSINNINPNILNLLIKENSVTSNIDLGFLSSHLQDFNNNNLPSLKTLDDNHFSQNTSPIWLHEPPSLNQTMLPTHDPCAQSVDGFGSNQASSSHDQEVAVTDSVDWPDHHLFDDSMFPDISYQS

SEQ ID NO: 36 - protein, 374 aa, Arabidopsis thaliana
MGRAPCCDKANVKKGPWSPEEDAKLKDYIENSGTGGNWIALPQKIGLRRCGKSCRLRWLNYLRPNIKHGGFSEEEDNIICNLYVTIGSRWSIIAAQLPGRTDNDIKNYWNTRLKKKLLNKQRKEFQEARMKQEMVMMKRQQQGQGQGQSNGSTDLYLNNMFGSSPWPLLPQLPPPHHQIPLGMMEPTSCNYYQTTPSCNLEQKPLITLKNMVKIEEEQERTNPDHHHQDSVTNPFDFSFSQLLLDPNYYLGSGGGGEGDFAIMSSSTNSPLPNTSSDQHPSQQQEILQWFGSSNFQTEAINDMFINNNNNIVNLETIENTKVYGDASVAGAAVRAALGGGTTSTSADQSTISWEDITSLVNSEDASYFNAPNHV

SEQ ID NO: 37 - protein, 354 aa, Brassica napus
MGRSPCCEKTGLKKGPWTSEEDQKLVDYIQQHGYGNWRTLPKNAGLQRCGKSCRLRWTNYLRPDIKRGRFSLEEEETIIHLHSFLGNKWSAIAARLPGRTDNEIKNFWNTHIRKKLLRMGIDPVTHSPRLDLLDISSILASSLYNSSSHHVNMSRLMMDTHRQQQQHPLVNPEILKLATSLFSQNQTQTQNHNQNQNFVVDHDTNTHEHHSVYHQDVNQAGVNQYQTGHQDYQPCMPPFPNEAQFNDMDHQFNGFGEQTLASTSNTSVQDCNIPSFNDYANSSFVLDPSYSDQSFSFANSVLNTPSSSPTTLNSSSTTYINSSSCNTEDEMESYCSNLVKFDILDFLDVNDFLI

SEQ ID NO: 38 - protein, 289 aa, Brassica napus
MGRLPCCDKNGVKKGPWTPEEDQKLIDYIRVHGPGNWRILPKNAGLQRCGKSCRLRWTNYLRPDIKRGRFSFEEEETIIQLHSVMGNKWSAIAARLPGRTDNEIKNHWNTHIRKRLVRSGIDPVTHSPRLDLLDLSSLLAAIFNQPKFSSVATNASSLLNPDVLRLASLLLPPQQPLQNPNTLYASNLDQNLQTPNTSVSSQDSQPQAECTAPTKDETSYFEPIMNARLEVGPSDVLPPLSESFDLDSLMSTPYYSPQQNNIEAEANSSSLFDFRFPDNFTFDDFMGLL

SEQ ID NO: 39 - protein, 348 aa, Brassica napus
MGRSPCCEKNGLKKGPWTSEEDQKLIEYIQKHGYGNWRTLPKNAGLQRCGKSCRLRWTNYLRPDIKRGRFSFEEEETIIKLHSFLGNKWSAIAARLPGRTDNEVKNFWNTHIRKKLLRMGIDPVTHSPRLDLLDISTILASSLSNSSLHHVNISTLMMDAHRQQQQYPLVNPEILKFATSLSSQNQNQNYMVDHDSSTHDHENHTLYRHDVNQTGVNQYQTDHQELQSCLPPFPNEYQFNDMDHQFNGFGEHTFASTSNASVQDCNIPTFNDYESSSFVLDPSHSDQSFNFANSVLNTPSSSPTTLNSGSTTYIDSSSCSTEDEMESYCNNLMKFDIPDVLGISGVII

SEQ ID NO: 40 - protein, 285 aa, Brassica napus
MGRSPCCDKNGVKKGPWTSEEDQKLIDYIRFHGPGNWRILPKNAGLQRCGKSCRLRWTNYLRPDIKRGRFSFEEEETIIQLHSVMGNKWSAIAARLPGRTDNEIKNHWNTHIRKRLVRSGIDPVTHSPRLDLLDISSLLAALINQPNFSSVATHASSLLHPDVLRLASLLLPPQQPLQNFNPIYAPNLDQNIQTPITTVSSQDSQLQAECTTPVSNNETSSFDPFMKARLEVSHEDVLPPLAESLDLESLMSTPQQNSIEAEANSSSFFDFGLPDNFTFEDFMLN

SEQ ID NO: 41 - protein, 343 aa, Brassica napus
MGRSPCCEKNGLKKGPWTSEEDQKLLDYIQKHGYGNWRTLPKNAGLQRCGKSCRLRWTNYLRPDIKRGRFSFEEEETIIHLHSFLGNKWSAIAARLPGRTDNEIKNFWNTHIRKKLLRMGIDPVTHSPRLDLLDVSSILASSLHNSSSDHLKMSRLMMDAHRQHQQQQPLINPEILKLATSLFSQNHNQNFVMDHESKIHDNHTAYHHDVNQIGVNQYQTDHQELQYCLPPFPNEAHFNDMDHHGEHTFASNSSTSVQDCNIQPFNDYASSSFVLDHSYLDQSFNFADSVLNTPSSSPSMLNSSAMAYINSSSCSTEDEMENYCNNLMKFDIPNFLDVDGFIL

SEQ ID NO: 42 - protein, 334 aa, Brassica napus
MGRSPCLDKKIGLKKGPWTPEEDQKLIDYINKHGYGNWRTLPKNAGLERCGKSCRLRWTNYLRPDIKRGRFSFEEEEIIIQLHSIMGNKWSAIAARLPGRTDNEIKNYWNTHIRKRLLKLGIDPVTHSPRLDLLDISSILSSSVYNSSHHHQQNMLRLMMGDGHHHHQPLVNPEILKLATSLFSNSQQQYKNQNNPTNTHEVNQPEVNQYQTGYNLIGNQELQSCFPSMDQFAEFQDPMPTTRFPDSVHSLPLNQDYDYSTSNFALEPFYSDFASVLATPSSSPTPLDSSSTTYINSSTCSTEDEKESYCNNNFMNSSEIGPDYSFDVNGFLQF

SEQ ID NO: 43 - protein, 354 aa, Brassica napus
MGRSPCCEKTGLKKGPWTSEEDQKLVDYIQQHGYGNWRTLPKNAGLQRCGKSCRLRWTNYLRPDIKRGRFSLEEEETIIHLHSFLGNKWSAIAARLPGRTDNEIKNFWNTHIRKKLLRMGIDPVTHSPRLDLLDISSILASSLYNSSSHHVNMSRLMMDAHRQQQQHPLVNPEILKLATSLFSQNQTQTQNHNQNLNFVVDHDTNTHEHHSVYHQDVNQAGVNQYQTGHQDYQPCMPPFPNEAQFNDMGHQFNGFGEQALASTSNTSVQDCNIPSFNNFANSSFVLDPSYSDQSFSFANSVLNTPSSSPTTLNSSSTTYINSSSCNTEDEMESYCSNLVKFDISDFLDVNDFLI

SEQ ID NO: 44 - protein, 288 aa, Brassica napus
MGRLPCCDKNGVKKGPWTPEEDQKLIDYIRLHGPGNWRILPKNAGLQRCGKSCRLRWTNYLRPDIKRGRFSFEEEETIIQLHSVMGNKWSAIAARLPGRTDNEIKNHWNTHIRKRLVRSGIDPVTHSPRLGLPDLSSLLAAIFNQPNFSSVATNASSLFNLDVLRLASLLLPPQQPLQNPNTLYESNLDQNLQTPNTSVSSQGTQPQAECTAPTKDETSYFEPMNARLEVGPSDVLPPLSESFDLDSLMSTPNYSPQQNNIEAEANSSSLFDFRFPDNFTFDDFMGLL

SEQ ID NO: 45 - protein, 349 aa, Brassica napus
MGRSPCCEKNGLKKGPWTSEEDQKLIEYIQKHGYGNWRTLPNNAGLQRCGKSCRLRWTNYLRPDIKRGRFSFEEEETIIKLHSFLGNKWSAIAARLPGRTDNEIKNFWNTHIRKKLIRMGIDPVTHSPRLDLLDISTILASSLYNSSSHESHHVNMSTLMMDAHRQQQQYPLVNPEILKLATSLFSQNQTQNYMVDHDSSTHENHTGYHNDVNQTGVNQYQTDHQELQSCLPPFPNEAQFNNMDYRFNGFGEHTLVSTSNTLVQDCNIPTFNDYESSSFVLDPSYSDQSFNFTNSVLNTPSSSPTTLNSCSTTYINSTSCTTEDEMESYCNNLMKFDIPDFLDICGVII

SEQ ID NO: 46 - protein, 285 aa, Brassica napus
MGRSPCCDKNGVKKGPWTSEEDKKLIDYIRFHGPGNWRTLPKNAGLQRCGKSCRLRWTNYLRPDIKRGRFSFEEEETIIQLHSVMGNKWSAIAARLPGRTDNEIKNHWNTHIRKRLVRSGIDPVTHSPRLDLLDISSLLAALINQPNFSSVATHASSLLHPDVLRLASLLLPPQQPLQDFNPIYAPNLDQNIQTPITTVSSQDSQLQAECTTPVSNNETSSFDPFMKARLEVSHEDVLPPLSESFDVESLMSTPQQNSIEAEANSSSFFDFGFPDNFTLEEFMLN

SEQ ID NO: 47 - protein, 343 aa, Brassica napus
MGRSPCCEKNGLKKGPWTSEEDQKLLDYIKKHGYGNWRTLPKNAGLQRCGKSCRLRWTNYLRPDIKRGRFSFEEEETIIQLHSFLGNKWSAIAARLPGRTDNEIKNFWNTHIRKKLLRMGIDPMTHSPRLDLLDISSILASSLYNSSSRHVNMSRLMMDAHRQHQQQQPLVNPEILELATSLFSQNQNQNFVMDHDSKTHDNHTSYHHDVNQTGVNQYQTNHQELQYCLPPFPSEAHINDMDHHGEHTFALNLNTSVQDCDIQLFNDYASSNFVLDHSYLDQSFNFADSVLNTPSSSPTTLNSSATTYIKSSSCSTEDEIESYCSNFIKFDIPDFLDVNGFII

SEQ ID NO: 48 - protein, 334 aa, Brassica napus
MGRSPCLDKKIGLKKGPWTPEEDQKLIDYINKHGYGNWRTLPKNAGLERCGKSCRLRWTNYLRPDIKRGRFSFEEEEIIIQLHSIMGNKWSAIAARLPGRTDNEIKNYWNTHIRKRLLKLGIDPVTHSPRLDLLDISSILSSSVYNSSHHHQQNMLRLMMGDGHHHHQPLVNPEILKLATSLFSNSQQQYKNQNNPTNTHEVNQPEVNQYQTAYNIIGNQELQSCFPSMDQFAEFQDPMPTTTFPDSVHSLPLNQDYDYSTSNFALEPFYSDFASVLATPSSSPTPLDSSSTTYINSSTCSTEDEKESYCNNNFMNSSEIGPDYSFDVNGFLQF

SEQ ID NO: 49 - protein, 337 aa, Glycine max
MGRAPCCDENGLKKGPWTPEEDLKLTNYIQIHGPGNWRSLPKNAGLRRCGKSCRLRWTNYLRPDIKRGRFSLEEEDVIIQLHSILGNKWSAIAARLPGRTDNEIKNYWNTHIRKRLLRMGIDPVTHTPRLDLLDMSSILRSMLGNPSLLNMQGLLGAQVLMNQGLLKLASTASLLSTINNDENPNLASQNFVHSQVATTPPSLDSTQFQFQMPTNQTNNVEVEGFLGTVTNLSCSSSPSGDDKINLVLQQKNQVDLLGNHDVLVHSLYNAKNQNMGCDSVMRTPVSSPNRLNSSSNYVKSGTEEERESFCSDLFEFEIPESLDFADIFCNVPYTPIN

SEQ ID NO: 50 - protein, 338 aa, Glycine max
MGRSPCCNKNGLKKGPWTPEEDQKLIDYIQKHGYGNWRVLPKNAGLQRCGKSCRLRWTNYLRPDIKRGQFTFEEEETIIQLHSILGNKWSAIASRLPGRTDNEIKNYWNTHIRKRLLRMGIDPVTHRPRLDLLDLSSILSSTLYGSTQMNIQRLLGTNTVVNPELLKLASSPFPSLQQRQHQNMCAQNCEENHLCDPQIQNQIPQDLAQEALPFNHTQFVESNMNIIPYPSIFQDSSFQQHSQPSDLHCNGIDHTSYVPQLPNYDYPPISELSTYNNSYNNNQNFSYTSVLSTPSSSPTPLNSNSTYVNGCSSTEDETESYVSSNNLLRFEIPDMLCV

SEQ ID NO: 51 - protein, 344 aa, Glycine max
MGRSPCCDKNGLKKGPWTPEEDQKLFDYIQKHGYGNWRVLPKNAGLQRCGKSCRLRWTNYLRPDIKRGRFTLEEEETIIQLHSILGNKWSAIATRLPGRTDNEIKNYWNTHIRKRLLRMGMDPVTHRPRLDLLDLSSILSSSLYGSTQMNIQRLLGTHTVVNPEVLKLASSLFPSQQRENINMCAQNCEENQLCDPQIQSQIPHDLAQEALPFTHAQLVESNTMNTYPSIFHESGFQQHYSQLSDLHYNGIDHKSYVPQLPSYDYPPMSESSTYNNSYNNSNQNFSYASVLSTPSSSPTPLNSNSTFVKGSSSTEDETESYVSSNNLLRFEIPDMLRMNEYSYN

SEQ ID NO: 52 - protein, 323 aa, Glycine max
MGRVPCCDKNGLKKGPWTPEEDLKLTNYIQFHGPGNWRSLPKNAGLKRCGKSCRLRWTNYLRPDIKRGRFSLEEEDIIIQLHSILGNKWSAIASRLPGRTDNEIKNYWNTHIRKRLLRMGIDPVTHTPRLDLLDMSSILRSVFGKPSLLNMQGLLRAQALMNQGLLKLASTASLLSTINNDENPNLASHNYVQNQVTTPPSLDSAQFQFQMPTTQTNNVEVFSGTVANLSCSSSPSGDENLVLQQNQVGLSGNHDALVHSLNNANQNMECDSVLPTPVSSPNRLNSSSNYVRSGTDEERDSFFSDLFEFEIPESLDDIADIFL

SEQ ID NO: 53 - protein, 328 aa, Glycine max
MGRAPCCDKNDLKKGPWTPEEDLLLTNYIQTYGPGNWRTLPKNAGLQRCGKSCRLRWTNYLRPDIKRGKFSFEEEEAIIQLHSVLGNKWSAIAAKLPGRTDNEIKNYWNTNIRKRLLRMGIDPVTHAPRLDLLDMSSILRSAIGTVNPSFLNLQGLLGAQALMNPEFFKLAATATLLSLKNHENASNLVSQVQQQFNNNAGNGQVQNQVAAPNQFQTPTLSNNNVNNGLSSISPENSSIPSYLGENNYQLNAQQINQVDLLLDPELEHYLNSINQNIGHESVTPLSTPTSLNSSSTYVNSCAEEERDTYCSDVFKLEIPESLDISDFL

SEQ ID NO: 54 - protein, 375 aa, Glycine max
MGRAPCCDKNGLKKGPWTTEEDQKLIDYIQKHGYGNWRTLPKNAGLQRCGKSCRLRWTNYLRPDIKRGRFSFEEEETIIQLHSILGNKWSAIASRLPGRTDNEIKNYWNTHIRKRLLRMGIDPVTHSPRLDLLDINSILNASFYGSSQINIQRLLGMHQYVVNPELLKLASSLFSTSQQHNHDPDDMCAQKGQQNQLCDPQIQNHVPHFVQYQDPIQEVPACSTMFSTPCFSMPLTQPQLVEPNNVDQYTSSTFTDFSYQQLSDWHKDGIALSTLTDDYMPQLSSYNNYYSSNSHQNLMYPQVSEPSTFHSNNSNHQNFSFASVLSTPSSSPTPLNSNSTIINGSNTEDERDQSYDSSNMLKFEIPDILDVNEFM

SEQ ID NO: 55 - protein, 324 aa, Glycine max
MGRAPCCDKNGLKKGPWTSEEDLLLTNYIQTHGPGNWRTIPKNAGLQRCGKSCRLRWTNYLRPDIKRGRFSFEEEEAIIQLHSVLGNKWSAIAARLPGRTDNEIKNYWNTHVRKRLLRTGIDPVTHAPRLDLLDISSILRSAIGNVNPSILNLQGLLGAQALMNPEFLKLAATATLLSLKNNENPSNLVSQVQQQFNSAGNCLVQNQVAAPNDPFQTPTHVNNGLSSSSPENSILSHLGENNNYQLNAQQINQVDLLLDHELEHYLNCVNQNIGYESVTPLSTPTPLNSSSTYVNSSTEEERDTYCSDIFKLEIPESLDISDFL

SEQ ID NO: 56 - protein, 368 aa, Glycine max
MGRAPCCDKNGLKKGPWTTEEDQKLIDYIQKNGYGNWRTLPKNAGLQRCGKSCRLRWTNYLRPDIKRGRFSFEEEETIIQLHSILGNKWSAIASRLPGRTDNEIKNYWNTHIRKRLLRMGIDPVTHSPRLDLLDINSILNASFYGSSQINIQRLLGMHQYMVNPELLKLASSLFSTSQQQHNDPDDMPAQKGQLQNQLCDPQIQNHVPHFVQFQDPVQEVPACSTMFSTPCVSIPLTQPQLVEPNNVDQYPSSTFTDFSYQQLSDWQLSSLTDDYVPQLSSYNYYSSDGQNLMYDPLSEPSNFHSNNSNQNFRFASVLSTPSSSPTPLNSNSTIINGSNTEDERDQSYDSSNMLKFEIPDILDVNEFM

SEQ ID NO: 57 - protein, 327 aa, Gossypium hirsutum
MGKPPGCDKNGLKKGPWTAEEDQKLIDYIQKHGHGRWRTLPKNAGLKRCGKSCRLRWTNYLRPDIKRGKFSIEEDEVKVIIQLHSVLGNKWSAIAARLPGRTDNEIKNYWNTHIKKKLLRMGIDPVTHAPRLDLLELSSLLSSSLYNSSLNPAGFVGSMFNPSFLSLATAFLSSNQTKNLEINNLAGDIQQIQNPYEPYQGNQVPVITQVSQADLNQFSANPGLPNLWQIDNNVSDSKGFLPTTMQNINGYNHGFNLGDQNLQQVCTFSEKIPNLVPFGSLLSTPSSSSTPLNNGSSTEDIERDSYCSSNNLLIFDVPKGLNVNGSM

SEQ ID NO: 58 - protein, 300 aa, Gossypium hirsutum
MGRTPGCDKNGLKKGPWTPEEDLKLINYIQIHGAGHWRNLPKNAGLQRCGKSCRLRWTNYLRPDIKRGRFSFEEEETIIQLHSVLGNKWSAIACRLPGRTDNEIKNYWNTHIRKRLARNGIDPVTHAQRLDLVDLSSSIISSLLGVQALLNPQLLSLANTLLSLKQENPELLLQYLQQNQLLQTPTLEPLSQLLQAPMTDCSDQNSQKSNVLVSQPNYEHSNPNPTVPSLVSDNSDFHSMDGSQNFGLDSVRFTPISSPTPLHSSSTFINNSYTTHYEIERFNSLLKYEIPESLNINDLL

SEQ ID NO: 59 - protein, 359 aa, Gossypium hirsutum
MGRSPCCDKNGLKKGPWTPEEDQKLIDYIQKHGYGNWRTLPKNAGLQRCGKSCRLRWTNYLRPDIKRGRFSFEEEETIIQLHSILGNKWSAIAARLPGRTDNEIKNYWNTHIRKRLLRMGIDPVTHSPRLDLLDLSSILSSSFYNQSQMNISRLLGVNSLVNPELLRLATSFMSSQRENQNHKFIFDHNVEDNQLWSSQVQDQYQQPLMQSNHNHLPTQVQEIPACSIPFSNEAELMNLDQFPSNFSHLNDWQSNAMPSNLTEDYVPLPTNYDYYATDHHHHQTVKDPSSSETSNFQSNNSNQSFSFASVLSTPSSSPTQLNSNSTYVNNSGIEEEPDSYCSDILKFEIRDSLDVNDFM

SEQ ID NO: 60 - protein, 306 aa, Gossypium hirsutum
MGRALCCDKNGLKKGPWTPEEDKKLIDYIQKHGYGNWRTLPKNAGLQRCGKSCRLRWTNYLRPDIKRGRFSFEEEETIIQLHSILGNKWSAIAARLPGRTDNEIKNYWNTHIRKILLRMGIDPVTHTPRLDLLGLSFLHNQYLIQSFANPELLRNVDQYQPLMQSNHFHAQVEETPTCSVPFYNEEQQLVMKPNLNQFPSNFNDYVMPSILTEDYVPLPPQYNYYGSDYQTVMDPSIETSNFHSINSNQSLGLGSVVSTPSSSPAPLNSDFAYLNSSSTTENETESYCTNILKSEIPDILDVNDFM

SEQ ID NO: 61 - protein, 315 aa, Gossypium hirsutum
MGRAPCCDKNGLKKGPWTPEEDQKLIDYIQTHGYGNWRTLPKNAGLQRCGKSCRLRWTNYLRPDIKRGRFSFEEEEAITQLHSVLGNKWSAIAARLPGRTDNEIKNYWNTHIRKRLLRMGIDPVTHSPRLDLLDLSSILGCCSFYNQSQMNMSTRLLGGGGGVQPLVNPEILRLATSIMSSPQRENQNPDFLFHENQYQQPPLMQNTNVAEPVMNNNPNVIIDQFPFNGCFTDWQNNANAVLPYLTEDNYVPVPSNCYGGGNGEPSFRTPSSSSPTPLNSNNSTYINSSSTEDESYSSDILKFEIPDFLDVNEFM

SEQ ID NO: 62 - protein, 357 aa, Gossypium hirsutum
MGRAPCCDKTGLKKGPWTPEEDLKLTNYIQSHGPGNWRTLPKNAGLERCGKSCRLRWANYLRPDIKRGRFSFEEEETIIQLHSILGNKWSAIAARLPGRTDNEIKNYWNTHIRKRLLRNGIDPVTHAPRLDMLDLSSILTSTLCNQSLLNASNLLGAQPLLNPQLLRLANTLLSLKQENPDILVQYLHKNQLSNSQQHLVPSSLQPSQLQVQSTIQNDSTCTTSTPIPSTWALNQIELMQNNATGISSNMKSFSCPDTQETLTSTLTNACASLPKYVHCSPNPTDPFTSENSNVQSIGGSQMFSFDSVRSTPIRSPSPLNSPSTFINSSSSVDDERESFSSLLKFEIPDSLDISDFM

SEQ ID NO: 63 - protein, 254 aa, Gossypium hirsutum
MGKPPGCDKNGLKKGPWTAEEDQKLIDYIQKHGHGRWRTLPKNAGLKRCGKSCRLRWTNYLRPDIKRGKFSIEEDEVIIQLHSVLGNKWSAIAARLPGRTDNEIKNYWNTHIKKKLLRMGIDPVTHAPRLDLLELSSLLSSSLYNSSLNPAGFVGSMFNPSFFSLATAFLSSNQTKNLEINNLAGNIQQIQNPYEPYQGNQVPVITQVSQADLNQFSANPGLPNLWQIDNNVSDSKGFCRPPCKTLMATTMGFI

SEQ ID NO: 64 - protein, 341 aa, Gossypium hirsutum
MVVIVAFFIYHFHFSPPSLLLQAISHLHVNFTILFFFQGKSMGRTPCRDKNGLKKGPWTPEEDLKLINYIQIHGAGHWRKLPKNAGLQRCGKSCRLRWTNYLRPDIKRGRFSFEEEETIIQLHSVLGNKWSAIACRLPGRTDNEIKNYWNTHIRKRLARNGIDPVTHAQRLDLVDLSSSIISSLLGVQALLNPQLLSLANTLLSLKQENPELLLQYLQQNQLLQTPTLEPRSQLLQAPMTDCSNQNSQKSYVLVSQPNYEHSNPNPTVPSLVSDNSHFHSMDGSQNFGLDSVRFTPISSPTPLHSSSTFINGSYTTHYEIERFNSLLKYEIPESLNINDLL

SEQ ID NO: 65 - protein, 359 aa, Gossypium hirsutum
MGRSPCCDKNGLKKGPWTPEEDQKLIDYIQKHGYGNWRTLPKNAGLQRCGKSCRLRWTNYLRPDIKRGRFSFEEEETIIQLHSILGNKWSAIAARLPGRTDNEIKNYWNTHIRKRLLRMGIDPVTHSPRLDLLDLSSILSSSLYNQSQMNISRLLCVNSLVNPELLRLATSFMSSQRENQNHEFIVDHNVEDNQLCSSQVQDQYQQPLMQSNHNHLPTQVQEIPACSIPFSNEAELMNMDQFPSNFSHLNDWQSNAMPSDLTEDYVPLPPNYDYYATDHHHHQTVKDPSSSETSNFQSNNSNQSFSFASVLSTPSSSPTQLNSNSTYVNNSGIEEEPDSYCSNILKFEIRDVLDVNDFM

SEQ ID NO: 66 - protein, 306 aa, Gossypium hirsutum
MGRALCGDKNGLKKGPWTPEEDKKLIDYIQKHGYGNWRTLPKNAGLQRCGKSCRLRWTNYLRPDIKRGRFSFEEEETIIQLHSILGNKWSAIAARLPGRTDNEIKNYWNTHIRKILLRMGIDPVTHTPRLDLLGLSSLHNQYLIQSFVNPELLHNVDQYQPLTQSNHCHAQVEETQTCSVPFYNEELQLVMEPNVNQFPSNFNDYVMPSILTEDYVPLPPQYNYYGSDYQTVMDPSIETSNFHPINSNQSLGLGSVVSTPSSSPAPLNSNSAYLNSSSTTEDETESYCTNILKFEIPDILDVNDFM

SEQ ID NO: 67 - protein, 315 aa, Gossypium hirsutum
MGRTPCCDKNGLKKGPWTPEEDQKLIDYIQTHGYGNWRTLPKNAGLQRCGKSCRLRWTNYLRPDIKRGRFSFEEEEAIIQLHSVLGNKWSAIAARLPGRTDNEIKNYWNTHIRKRLLRMGIDPVTHSPRLDLLDLSSILGCCSFYNQSQMNMSTRLLGGGGGVQPLVNPEILRLATSIMSSPQRENQNPDILFHENQYQQPPLMQNTNVAEPVMNNNPNVIIDQFPFNGCFTDWQNNANAVLPYLTEDNYVPVPSNCYGGGNGEPSFRTPSSSSPTPLNSNNSTYINSSSTEDESYSSDILKFEIPDFLDVNEFM

SEQ ID NO: 68 - protein, 357 aa, Gossypium hirsutum
MGRTPCCDKTGLKKGPWTPEEDLKLTNYIQIHGPGNWRTLPKNAGLERCGKSCRLRWANYLRPDIKRGRFSFEEEETIIQLHSILGNKWSAIAARLPGRTDNEIKNYWNTHIRKRLLRNGIDPVTHAPRLDLLDLSSILTSTLCNQSLLNASNLLGAQPLLNPQLLRLANTLLSLKQENPDILVQYLHKNQLSNSQQHLVPSSLQPSQLQVQSTIQNDSTCTTSTPVPCTSALNQIELMQNSATGISSNMTSFSCPDTQEPLTSTLTNTCASLPNYVHWSPNPTDPFTSENSNVQSVGGSQMFSFDSVRSTPITSPTPLNSPSTFINSSSSVDDKKESFSSLLKFEIPDSLDISDFM

SEQ ID NO: 69 - protein, 368 aa, Oryza sativa
MGRAPCCEKSGLKKGPWTPEEDEKLIAYIKEHGQGNWRTLPKNAGLSRCGKSCRLRWTNYLRPDIKRGRFSFEEEEAIIQLHSILGNKWSAIAARLPGRTDNEIKNYWNTHIRKRLLRMGIDPVTHAPRLDLLDLTSLLKPAAAAAYYPTQADLDTLRALEPLAGYPDLLRLASAILPAATTTGAAAAAAAEQAQLLLPWLLQAQMAQQQQQVTPPPPPPPQAAATEQFLQATSTACHQMPGLVHASPTQQLAQQPQDHMAAATCHRRGAVQHPSYDNQLDYVPALMQMASDASNLQQWSSTVSSSNNHNVNSGVSTPSSSPAAAGQINSSSTTTTTTYGLNASGDVDDAGLLINMHLSELLDVSDYM

SEQ ID NO: 70 - protein, 327 aa, Lotus japonicus
MGRAPCCDNKSGLKKGPWTPEEDNLLINYIQTHGPGNWRNLPKNAGLQRCGKSCRLRWTNYLRPDIRRGRFSFEEEETIIQLHSVLGNKWSAIAARLPGRTDNEIKNYWNTHIRKRLLRMGIDPVTHAPRLDLLDMSNVLRTALTNPAFLNLQGLFGAQSLVNPELLKLAATATLLSLKNDNTGLISQNPQQINGIMNCHQVQNQVVPPEFTTSQLQTPIQSNNMAMNMSSSSSPENSNSINPSYFGDGLVPQQYQVDNLQQNLESVYQNMMGYGSVLSTPLSTPGTTTLNSPANFANSSAEEERDTYCSDMFKFEIPESLDISDFL

SEQ ID NO: 71 - protein, 332 aa, Lotus japonicus
MGRAPCCDKNGLKKGPWTQEEDQKLIDYIQKHGYGNWRILPKNAGLQRCGKSCRLRWTNYLRPDIKRGLFSFEEEETIIHLHSILGNKWSTIASRLPGRTDNEIKNYWNTHIRKRLLKMGIDPVTHSPRLDLLDLSSILSSPLYGSSQMNMYPEILKLASSLFSSSHQQNQDLNICDQNNGQEHHNQSFNPQIQNQQIQPCVSMPFNQSRLVESNLNPYPSISPDFCFQQHSQLSDWQHCNGIGSSTKTEDFVPQLPCYNYYNSDCYANNNNQNMSFSSVLPTPSSSPTPLNSNSTYKNGSSITEDETESFVSSNNILRFQIQDMLCVSEFL

SEQ ID NO: 72 - protein, 344 aa, Lotus japonicus
MGRTPCCEKNGLKKGPWTSEENQKLIDYIQKHGYGNWRTLPKNAGLQRCGKSCRLRWTNYLRPDIKRGRFTFEEEETIIQLHSILGNKWSAIASRLPGRTDNEIKNYWNTHIRKRLLKMGIDPVTHAPRLDLLDLSSILYSSLSGSSQINLQRLLSMQMNPELLNLASSLNMTSVVGQNGQHNNNNNQFYNPQIQSQILHFDQDPVQDCNTFSTSCVSLPQLDSYPSNFTDFGYQQNSQQSDNWDSNEIAYVPQLPSYDHYYGSDNQNFMCPPLSEASTFHSNNSNQNFSFASVLSTPSSSPTPLNSNSTYVNGSNTEDERESYDSSHMLKFEIPDILDVNEFM

SEQ ID NO: 73 - protein, 207 aa, Raphanus sativus
MARSPCCEKNGLKKGPWTSEEDQKLIEYIQKHGYGNWRTFPKKAGLHRCGKSCRLRWTNYLRPDIKRGRFSFEEEETIIKLHSFLGNKWSAIAARLPGRTDNEIKNFWNTHTRKKLLRMGIDPVTHSLRLNLLDISTILASSQYNSSSHHVNMSTLMMDSHRQQQQYPLVNPEILKLATSLFSQNQNQNQVVDHDPSTHVNHVDKLE

SEQ ID NO: 74 - protein, 184 aa, Raphanus sativus
MGRSPCLEKKIRLKKGPWTPELPGRTNNEIKNYWNTHMRKRLLKLGIDPVAHSPRLDLLDITSILSSSVYNSSHHHQENMLRLMMEFQDLMPMTTVQDSMPLFPLNQPDDYSTSNFALEPFYSDFASVLPTPSSSPTPLDSSSTTYINSSPCITEDEKESYSNNNFMSTSETCPDYSFDVNGFR

SEQ ID NO: 75 - protein, 352 aa, Raphanus sativus
MGRSPCCEKTGLKKGPWTSEEDKKLVDYIQQHGYGNWRTLPQNAGLQRCGKSCRLRWTNYLRPDIKRGRFSLEEEETIIHLHSFLGNKWSAIAARLPGRTDNEIKNFWNTHIRKKLLRMGIDPVTHSPRLDLLDISSILASSLCNSSSHHVNMSRLMMDTHRQQQQHSLVNPEILKLATSLFSQNQTQNHNQNQNFVVDHDTNNQEHHSVYHQDVNEAGVNQYQTDHQDYQSCMPPFPNEAQFNDMGHQFNIFGEQNLASTSNTSVQDCNIPSFNDYANSGFVLDPSYSDKSFSFANSVLNTPSSSPTTLHSSSTTYINSSSYNTEDEIESYCSNLMKFDIPDFLDVNDFLI

SEQ ID NO: 76 - protein, 288 aa, Raphanus sativus
MGRLPCCDKNGVKKGPWTPEEDQKLIDYIRVHGPSNWRILPKNAGLQRCGKSCRLRWTNYLRPDIKRGRFSFEEEETIIQLHSVMGNKWSAIAARLPGRTDNEIKNHWNTHIRKRLVRSGIDPVTHSPRLDLLDLSSLLAAILNQPNFSSVATHASSLLNPDVLRLASLLLPPQQPLPNPNTLYASNLDQNLQTPNTSVSSQDTQPQAECTTPTMDETSYFEPVNARLEVGPSDVLPPLSESLDLDSLMSTPNYSPQQNNIEAEANSSSLFDFGFPDNITFDDFMGLL

SEQ ID NO: 77 - protein, 289 aa, Raphanus sativus
MGRLPCCDKNGVKKGPWTPEEDQKLIDYIRVHGPGNWRILPKNAGLQRCGKSCRLRWTNYLRPDIKRGRFSFEEEETIIQLHSVMGNKWSAIAARLPGRTDNEIKNHWNTHIRKRLVRSGIDPVTHSPRLDLLDLSSLLAAILNQPNFSSVASHASSLLNPDVLRLASLLLPPQQPLPNPNTLYASNLDQNLQTPNTPVSSQDTQPQAECTTPTKDETSYFEPVNARLEVGPSDVLPPLSESLDLDSLMSTPNYSPQQNNIEAEANYSSSLFDFGFPDNLTFDGFMGLL

SEQ ID NO: 78 - protein, 282 aa, Raphanus sativus
MGRSPCCDKNGVKKGPWTSEEDQKLIDYIRFYGPGNWRTLPKNAGLQRCGKSCRLRWTNYLRPDIKRGRFSFEEEETIIQLHSVMGNKWSAIAARLPGRTDNEIKNHWNTHIRKRLVRSGIDPVTHSPRFDLLYISSLLAVLINQPNFSSVATHASSLLHPDVLRLASLLLPPQQPLQNFNPIHEPNLDQNIQTPITSVSSQDSQPQAECTTPSNNEATYFDPVNARVEGHADLLPPLSESFDLESLMSTPQQNSIEAGANSSSFFDFGFPDNFTFEDFMLN

SEQ ID NO: 79 - protein, 335 aa, Raphanus sativus
MARSPCCEKNGLKKGPWTSEEDQKLIEYIQKHGYGNWRTFPKKAGLHRCGKSCRLRWTNYLRPDIKRGRFSFEEEETIIKLHSFLGNKWSAIAARLPGRTDNEIKNFWNTHTRKKLLRMGIDPVTHSLRLNLLDISTILASSQYNSSSHHVNMSTLMMDSHRQQQQYPLVNPEILKLATSLFSQNQNQNQVVDHDPSTHVNQTGVNQYQINHQELQSYLPPFPNEAQFNDMDQQFNGFGEHTLVSNTSVQDCNIPTFNVYESSGFVLDPFYSDQTFNFATSVLNTPSSSPTMLNSCSTTYINSSSDNIEDEKEHHCNNLMKFDISDFLDVNGVII

SEQ ID NO: 80 - protein, 352 aa, Raphanus sativus
MGRSPCCEKNGLKKGPWTSEEDQKLLDYIQKHGYGNWRTLPKNAGLQRCGKSCRLRWTNYLRPDIKRGRFSFEEEEAIIQLHSFLGNKWSAIAARLPGRTDNEIKNFWNTHIRKKLLRMGIDPTTHNPRLDLLDISSILASSLYNSSSHHVNMSRVMMDAHHQQQHNPLVNPEILKFANSLFSQDQDHNHNHNHNQNRNQNFLVNHDSKTHENYTVNHDDNQTGVNQYQTNHHEIQYCLPPFPDEAHFNDTDHNGEHMFASNSNMSVQDCNTQSLNDYASSSFVVDHSYLDHNFNIAYSVMNTPSSNPTLNSSVTTYINSSSCSTEDEMESYCSNLMKFDISDFLDVNDFII

SEQ ID NO: 81 - protein, 345 aa, Raphanus sativus
MGRSPCLEKKIGLKKGPWTPEEDQKLIDYIKKHGYGNWRTLPKNAGLERCGKSCRLRWTNYLRPDIKRGRFSFEEEETIIQLHSIMGNKWSAIAARLPGRTDNEIKNYWNTHIRKRLLKLGIDPVTHSPRLDLLDITSILNSSVYSSSHHHQENMLRLMMGDGNHHQPLVNPEILKLATSLFSNSQHRHQNQNNSTTYEFNTVNKTEVNQDQTGYNMIGNQVLQSCFPSMDQFTEFQDLMPVTTVQDLMPLFPLNQEDVYSTSNFSLEPFYSDFASVLTTPSSSPTSLDSSSTTYINSSTCSTEDEKESHCNNFISASEMCPEYSFDVNGFLQFQETKDHWDIVI

SEQ ID NO: 82 - protein, 362 aa, Setaria italica
MGRAPCCEKSGLKKGPWTPEEDEKLVAYIKKHGQGNWRTLPKNAGLARCGKSCRLRWTNYLRPDIKRGRFSFEEEETIIQLHSILGNKWSAIAARLPGRTDNEIKNYWNTHIRKRLLRMGIDPVTHAPRLDLLDLSALLKPAAYYPTQADLDALRAFEPLASYPDLLRLASTLLSSGSAAAPAAIGDQQQLLPWLLQAQMAQAAAMALPQQADHQFMSQQQQQAGAACQMPDLVHANPMVQQQQLAAAAQQQQHQDMAAAACNSMQAPPSGYVDGLDVPALMQMVQPDASNLQQWSSTVTSSNNNNVGSGVSTPSSSPVAAGLNHSAASTATTYGGGASASSDAAALFSMQLSELLDVSDYM

SEQ ID NO: 83 - protein, 374 aa, Sorghum bicolor
MGRAPCCEKSGMKKGPWTPEEDEKLIAYIKKHGQGNWRTLPKNAGLARCGKSCRLRWTNYLRPDIKRGRFSFEEEETIIQLHSILGNKWSAIAARLPGRTDNEIKNYWNTHIRKRLLRMGIDPVTHAPRLDLLDLSALLKPAAAAYYPTQADLDTLRALEPLANYPDLLRLASTLLSSGPPAIGDHHQNGQLLPWILQAQMAQQAAAAMAQQVAPPPQQQAEQFMQAGAACQMPDLVHMNSNPTTVQQQLAAAHQDMAAAACHSMQPPNNTGYEVDSLDVPALMQMVQAADASNLQQWSSTVTSSSNNNNNNNNNVGSGVSTPSSSPVARLNHSTSTTTTTYGGASASTSNDAAAAAALFNMQLSELLDVSDYM

SEQ ID NO: 84 - protein, 349 aa, Thlaspi arvense
MGRSPCCEKKNGLKKGPWTPEEDQKLIDYINKNGYGNWRTLPKNAGLQRCGKSCRLRWTNYLRPDIKRGRFSFEEEETIIQLHSIMGNKWSAIAARLPGRTDNEIKNYWNTHIRKRLLKMGIDPVTHSPRLDLLDISSILSSSLYSSSSHHHLQQHMNMSRLMMGDGHHQQLVNPEILKLATSLFSTSQQHHQNQNHTTQENQTDINQYQSGYNMIGNQELQSCFPNMDQFAEFQGFVPTKTVQDSMPSYPSYHDDDYSKSNFVLEPYYSDFASVLTTPSSSPTPLNSNSTSYINSSTCSTEDEKDYCSNNLMSTSEIPDYSFDVNGFLQFQETKKPLGQSYLTKYCIR

SEQ ID NO: 85 - protein, 343 aa, Thlaspi arvense
MGRSPCCEKNGLKKGPWTSEEDQKLVDYIQKHGYGNWRTLPKNAGLQRCGKSCRLRWTNYLRPDIKRGRFSFEEEETIIQLHSYLGNKWSAIAARLPGRTDNEIKNFWNTHIRKKLLRMGIDPVTHSPRLDLLDISSILASSLYNSSSHHVDISRLMMDAHRHQQQHPLVNPEILKLATSLFSQTQNQNQNQNFVLDHDSKTQETSTVYYNDVNQTGGHQYQTDHQELQSCMPPFPNEAQFNDMDRQFNGFGEQTLASTSNTSVQDCSVPSFNDYASSSLVLDPSYSDQSFNFANSVLNTPSSSPTTYINSSSCSTEDEMESYCSNLMKFDIPDFLDVNGFII

SEQ ID NO: 86 - protein, 284 aa, Thlaspi arvense
MGRSPCCDKNGVKKGPWTPEEDQKLIDYIRFHGPGNWRILPKNAGLQRCGKSCRLRWTNYLRPDIKRGRFSFEEEETIIQLHSVMGNKWSAIAARLPGRTDNEIKNHWNTHIRKRLVRSGIDPVTHTPRLDLLDLSSLLAALFNQPNFSSVASSLLNPDVLRLASLLLPPQQPHQNPNPVYASNLDQNLQTPITSVSSQDSQPQAECATPTNNENSSFEPMKARLEVGPADVSPPLSESLDLDSLMSTPNSSPQLNSIEAEANSSSFFDFGFPENFIFDDFMLI

SEQ ID NO: 87 - protein, 319 aa, Typha domingensis
MGRPPCCDKNGLKKGPWTPEEDKKLVDYIHKHGQGKWRNLPKNAGLARCGKSCRLRWTNYLRPDIKRGRFSFEEEEAIIQLHSVLGNKWSAIAACLPGRTDNEIKNYWNTHIRKRLLSMGIDPVTHNPRLDLLDLSTLLNPSVYNPNQFDISSLLGIGPIVNSELLKIASDVLLSQNQYSSLVANTLQEPHLSTAQLQNQFPSLLQGQIYPPQNLAQYVDESQLMQAQLHDLEMYHPGFDNLGSSINPQMSLCDNSDVQEFNIQNYNLPSGLSTPASSSTHLNSSSTYVNGSTEDERDSYCSNLFNLQIPGLLDVSDYM

SEQ ID NO: 88 - protein, 349 aa, Triticum aestivum
MGRAPCCDRTGLKKGPWTQEEDEKLVAYIKKHGQGNWRTLPRNADLERCGKSCRLRWTNYLRPDIKRGRFSFEEEETIIQLHSILGNKWSAIAARLPGRTDNEIKNYWNTHIRKRLLRMGIDPVTHAPRLDLLDLSSLLKPAAYYPTQADLDTLRALEPLANYPDLLRLASTLLAAPTTTSSQPTTEQQMLLPWLIQAQMAQQVSQAPPQHATAADMFLQPSSACQMPGLVHANPAQQLHQDHMVPSDYGQLPGYDNQLELDYVPALMQMASDTSNLQWSSPVTSSNNNNNCNVGSGVSTPSSSPAGRVNSASPTTFCANASNIDAFSADAAGLFDMHLSDLLDVSDYM

SEQ ID NO: 89 - protein, 348 aa, Triticum aestivum
MGRAPCCDRTGLKKGPWTQEEDEKLIAYIKKHGQGNWRTLPKDADLERCGKSCRLRWTNYLRPDIKRGRFSFEEEETIIQLHSILGNKWSAIAARLPGRTDNEIKNYWNTHIRKRLLRMGIDPVTHAPRLDLLDLSSLLKPAAYYPTQADLDTLRAFEPLANYPDLLRLASTLLAAPTTTSSQPTTQQQMLLPWLIQAQMAQQVPQAPPQHATAADMFLQPSSACQMPGLVHANPAQQLHQDHVVASDYGQLPGYDNQLELDYVPALMQMASDTSNLQWSSPVTSSNNNNCNVGSGVSTPSSSPAGRVNSASTAAFCANTSNIDAFSADAAGLFDMHLSDLLDVSDYM

SEQ ID NO: 90 - protein, 255 aa, Zea mays
MGRAPCCERSGLKKGPWTPEEDEKLVAYIKKHGQGNWRTLPKNAGLARCGKSCRLRWTNYLRPDIKRGRFSFEEEEAIIQLHSILGNKWSAIAARLPGRTDNEIKNYWNTHIRKRLLRMGIDPVTHAPRLDLSALLKPAAAYYPTQADLDTLRALEPPLASYPDLLRLASALLSGRPAAPAIGEHRQQQLLPGNNHNSVGSGVSTPTSSSPVPRLDHSTTCVATTFGGGGASTDDVAALFDMQLSELLDVSDYML

SEQ ID NO: 91 - protein, 375 aa, Zea mays
MGRAPCCEKSGLKKGPWMPEEDEKLVAYIKKHGQGNWRTLPKNAGLARCGKSCRLRWTNYLRPDIKRGRFSFDEEETIIQLHSILGNKWSAIAARLPGRTDNEIKNYWNTHIRKRLLRMGIDPVTHAPRLDLLDLSALFKPAAAAAYYPTQADLDTLRALEPLANYPDLLRLASALLSGPPAAPAIGDQQPRQLLPWILQAQMAQQAAAAVAQAQLQVAPQAEQFVQQRQAAGAACQMPDLVHTSPTVQQHQQVAAAQEQQHQPQGQDDMAAACHSMQPQPPTGGYAVDTLDIPALMQMVQADDASNLQQWSSMITSSTNNNNVGSGVSTPSSSPVPRLNHSTTATTTYGGASDADAAALFNMQLSELLDVTDYM

SEQ ID NO: 92 - DNA, 1065 bp, Brassica napus
  source 1..1065: mol_type = other DNA
atgggaagatcaccttgctgcgagaagactggcctcaagaaagggccatggacgtctgaggaagaccagaagcttgttgattatatccagcaacatggatatggtaactggagaaccctccccaaaaatgctggtttgcaaagatgtggcaagagttgtcggctaaggtggactaattatctccgaccagatataaagcgagggcgattctccttggaagaagaagaaactattattcatcttcatagctttttaggaaacaaatggtctgctattgcggcacgtttgcctggaagaacagataacgagatcaaaaacttttggaacacacatattagaaagaagttgcttagaatggggatcgatccagtgactcacagtccccgacttgatctccttgatatctcatccatcttggcatcatctctatacaattcctcttcacatcatgtcaacatgtcaagactcatgatggatactcatcgtcaacagcaacaacatcctttggttaaccccgagattctcaaacttgctacctctctcttttctcaaaaccaaacccaaacccaaaaccacaaccaaaaccaaaacttcgtggtggatcatgacacaaatacccacgagcaccactcagtttatcatcaagatgttaaccaagccggagtaaatcagtaccaaaccggccatcaagattaccaaccttgcatgccgccattccccaatgaagcgcagttcaacgacatggatcatcagttcaatggttttggagaacaaactctcgcttcaacctcgaatacatcagtccaagattgcaatattccatcgttcaacgactatgcaaactctagttttgtattagatccttcttattcagaccagagctttagttttgctaattcggtcttgaacacgccatcctcgagcccgactacattaaactccagttccacgacttacatcaatagtagcagttgcaacactgaggatgaaatggaaagctattgcagtaatctcgtaaagtttgatattctcgatttcttggacgttaatgattttcttatataa

SEQ ID NO: 93 - DNA, 870 bp, Brassica napus
  source 1..870: mol_type = other DNA
atgggaagattaccttgttgtgacaagaatggagtgaagaaaggaccatggacgcctgaggaggatcagaaactcatcgattatattcgagttcatggtccgggcaactggcgtattctccctaaaaatgctggactccaaaggtgtggaaaaagctgccgtcttcgatggaccaattatctaagaccagacatcaagagaggaagattctccttcgaggaagaagaaactatcattcagctacacagtgttatgggaaacaagtggtccgcaatagcagctcgtctacctggaagaactgacaacgaaattaaaaaccattggaacactcacatccgcaagcgacttgtaaggagtggcatcgaccctgtaactcactctccgcgccttgatcttcttgacttgtcctcacttctagccgcgattttcaatcaaccaaaattttcatcagttgcaacaaatgcatcgtctctgcttaatcctgatgtattgaggttggcttctcttctcttgccccctcaacaaccacttcaaaaccctaatacactttacgcatcgaacctcgaccaaaatcttcaaactccaaacacatcagtatcgtctcaagactctcaaccacaagccgagtgtacagctccaacaaaggatgaaacttcatattttgagcctatcatgaacgcaagactcgaggttggtccttcagatgtattacccccgttgtcagagagttttgacttagactcactcatgtcaacgccatattattctccacaacaaaataacattgaagcagaagccaactccagcagtttattcgactttaggtttccggataattttacctttgatgactttatggggttgctttag

SEQ ID NO: 94 - DNA, 1047 bp, Brassica napus
  source 1..1047: mol_type = other DNA
atggggcgatcaccttgttgcgagaagaacggactcaagaaagggccatggacttcagaggaagaccagaagcttatcgagtatatccagaaacatggatatggtaactggagaaccctccccaaaaatgctggtttgcagagatgtggcaagagttgccgattaaggtggactaactatctccgaccagatataaagcgaggaagattctccttcgaagaagaagaaacaattattaagcttcatagtttcttaggaaacaaatggtctgcgattgctgcgcgtttgcccggaagaactgataacgaggtcaaaaacttttggaacacacatataagaaagaagctacttagaatggggattgatccagtgactcacagtccacgactcgatctccttgacatctcaaccatcttagcgtcatctctatccaattcctctttacatcacgtgaacatatcaacactcatgatggatgctcatcgtcagcagcaacaatatccattggttaaccccgaaatactcaagttcgctacctctctctcctctcaaaaccaaaaccaaaactacatggtggatcatgactcaagcacccacgaccacgagaaccatacgctttatcgtcatgacgttaaccaaaccggagtaaatcaatatcaaaccgaccatcaagagctccagtcttgcttgccgccattccccaatgaatatcagtttaatgacatggaccatcagttcaatggtttcggagaacatactttcgcttcaacctcgaatgcgtcggtccaagattgcaatattccaacatttaacgattatgaaagctctagttttgtattagatccttctcattcagatcagagtttcaacttcgctaattcggtcttgaatacaccatcctcgagccccactacgttaaactcaggctccacaacttacatcgatagtagcagttgcagcactgaggatgaaatggaaagctattgcaataatctcatgaagtttgatattccagatgttttgggcattagtggtgttatcatataa

SEQ ID NO: 95 - DNA, 858 bp, Brassica napus
  source 1..858: mol_type = other DNA
atgggaagatcaccttgttgtgataagaatggagtgaagaagggaccatggacgtctgaggaggatcagaaactcatcgattatattcgatttcatggtccgggcaattggcgtatcctccctaaaaatgctggactccaaaggtgtggaaaaagctgtcgtcttcgttggaccaattatctaagaccggacatcaagagaggaagattttccttcgaggaagaagaaactatcattcagctacacagtgttatgggaaacaagtggtccgcaatagcagctcgtttaccaggaaggaccgataatgaaattaaaaaccattggaatactcacatccgcaagcgacttgtaaggagtggcatcgaccctgttactcactccccacgccttgatcttcttgatatttcctcacttttagccgcacttatcaatcaaccaaacttttcatcagtagcaacacatgcatcgtctctgcttcatcctgatgtattgagattggcctctcttctcttaccccctcaacaaccactccagaactttaatccaatttacgcaccgaacctcgaccagaatattcaaactccaatcacaacggtgtcgtctcaagactctcagctacaagccgagtgtacaactccagtatcaaacaacgaaacttcatcttttgatcctttcatgaaagcaagacttgaggtcagtcatgaagatgtattaccacctttggcagagagtttggacttagagtcactcatgtcaacgccacaacaaaatagcattgaagcagaagccaactccagcagtttcttcgactttgggcttccggataattttacctttgaggactttatgttaaattaa

SEQ ID NO: 96 - DNA, 1032 bp, Brassica napus
  source 1..1032: mol_type = other DNA
atgggaagatcaccttgttgcgagaagaacgggctcaagaaagggccgtggacgtccgaagaagaccagaagctccttgactatatccagaaacatggatatggtaactggagaacccttcctaaaaatgctggtttgcagagatgtggcaagagttgccgattaaggtggactaactatctccgaccagatataaagcgaggaagattctcctttgaagaagaagaaacaattattcatcttcatagctttttaggaaacaagtggtctgctattgcggcgcgtctgcctggaagaacagataacgaaatcaagaacttctggaatacacatataagaaagaaactacttagaatggggatcgatccagtgactcacagtccgcgactcgatctcctcgacgtctcatccatcttagcatcatctctacacaattcttcttcagatcatttgaagatgtcaagactcatgatggatgctcatcgtcagcatcaacaacaacaaccattgattaaccccgaaatactcaagctcgctacctctctcttctctcaaaaccacaaccaaaacttcgtgatggatcatgaatccaaaatccatgataaccacacggcttatcatcatgatgttaaccaaataggagtaaatcaataccagaccgaccatcaagaactccagtattgcttgccaccattccccaacgaagctcactttaacgatatggatcatcacggagaacatacgtttgcttcaaactcgagtacgtcggtccaagattgcaatattcagccgttcaacgactatgcaagctctagttttgtattagaccattcttatttagatcagagcttcaattttgctgattcggtcttgaacacgccatcctcgagtccaagtatgttaaactccagtgccatggcttacatcaacagtagcagttgtagcactgaagatgaaatggaaaattattgcaataatctcatgaaatttgatattcccaatttcttggacgtcgatggttttattttatga

SEQ ID NO: 97 - DNA, 1005 bp, Brassica napus
  source 1..1005: mol_type = other DNA
atgggaagatcaccatgtttggataagaaaattgggctcaagaaaggtccatggactccagaggaagatcaaaagctcattgattatatcaataaacatggttatggaaactggagaactcttcccaagaatgctgggttagagagatgtggtaagagttgtcgtctccggtggactaattatctccgaccagatataaaacgaggaaggttctcctttgaagaagaagaaatcattattcaacttcacagcatcatgggaaacaaatggtctgcaattgcggctagattgccaggaagaacagacaacgagatcaaaaactattggaacactcacatcagaaaaagacttctaaagttaggaatcgatccggtaacacatagtccacgtcttgatcttctggatatctcctccattctcagctcatctgtctacaactcttctcatcatcatcaacaaaacatgttgaggcttatgatgggtgatgggcatcatcatcatcagccattagtcaacccggagatactcaagctcgcaacgtctctcttttcaaattctcaacaacaatacaagaatcagaacaaccccaccaatacacacgaggttaaccaacccgaagtaaaccaataccaaaccggctacaatcttattggtaatcaagaattacaatcttgcttccctagcatggatcaattcgcagagtttcaagaccccatgccaacgacgaggtttccagattcagtgcattcgctcccattaaaccaggactatgattattcgacatctaacttcgcattagaacctttttactctgactttgcttcggtcttggccacaccctcttcgagcccgactccattagactcaagctccacaacttacatcaatagtagcacttgcagcaccgaggatgaaaaagagagttattgcaataataacttcatgaatagttctgaaataggtcctgattattcgtttgatgttaatggttttctgcaattctaa

SEQ ID NO: 98 - DNA, 1065 bp, Brassica napus
  source 1..1065: mol_type = other DNA
atgggaagatcaccttgctgcgagaagactggcctcaagaaagggccatggacgtctgaggaagaccagaagcttgttgactatatccagcaacatggatatggtaactggagaaccctccccaaaaatgctggtttgcaaagatgtggcaagagttgtcggctaaggtggactaattatctccgaccagatataaagcgagggcgattctccttggaagaagaagaaactattattcatcttcatagctttttaggaaacaaatggtctgctattgcggcacgtttgcctggaagaacagataacgagatcaaaaacttttggaacacacatattagaaagaagttgcttagaatgggcatcgatccagtgactcacagtccccgacttgatctccttgatatctcatccatcttggcatcatctctgtacaattcctcttcacatcatgtcaacatgtcaagactcatgatggatgctcatcgtcaacagcaacaacatcctttggttaacccggagattctcaaactcgctacctctctcttttctcaaaaccaaacccaaacccaaaaccacaaccaaaacctaaacttcgtggtggatcatgacacaaatacccacgagcaccactcagtttatcatcaagatgttaaccaagccggagtaaatcagtaccaaaccggccatcaagattaccaaccttgcatgccgccattccccaatgaagctcagttcaacgacatgggtcatcagttcaatggtttcggagaacaagctctcgcttcaacctcgaatacatcggtccaagattgcaatattccatcgttcaacaactttgcgaactctagttttgtattagatccttcttattcggaccagagctttagctttgctaattcggtcttgaacacgccatcctcgagcccgacaacattaaactccagttccacgacttacatcaatagtagcagttgcaacactgaggatgaaatggaaagctattgcagtaatctcgtaaagtttgatatttccgatttcttagacgttaatgattttctcatataa

SEQ ID NO: 99 - DNA, 867 bp, Brassica napus
  source 1..867: mol_type = other DNA
atgggaagattaccttgttgtgacaagaatggagtgaagaaaggaccatggacgcctgaggaggatcagaaactcatcgattatattcgacttcatggtccgggcaactggcgtattctccctaaaaatgctggactccaaaggtgtggaaaaagctgccgtcttcgatggaccaattatctaagaccagacatcaagagaggaagattctccttcgaggaagaagaaactatcattcagctacatagtgttatgggaaacaagtggtccgcaatagcagctcgtctacctggaaggactgacaacgaaattaaaaaccattggaacactcacatccgcaagcgacttgtaaggagtggcatcgaccctgtaactcactccccgcgccttggtcttcctgacttgtcctcacttcttgccgcaattttcaatcaaccaaacttttcatcagttgcaacaaatgcatcgtctctgtttaatcttgatgtattgaggttagcttctcttctcttgcctcctcaacaaccacttcaaaaccccaatacactttacgaatcgaacctcgaccaaaatcttcaaactccaaacacatcagtgtcgtctcaaggcactcaaccacaagccgagtgtacagctccaacaaaggatgaaacttcatattttgagcctatgaacgcaaggctagaggtcggtccttcagatgtactaccacctttgtcagagagttttgacttagactcactcatgtcaacgccaaattattctccacaacaaaataacattgaagcagaagccaactccagcagtttattcgactttaggtttccggataattttacctttgatgactttatggggttgctttaa

SEQ ID NO: 100 - DNA, 1050 bp, Brassica napus
  source 1..1050: mol_type = other DNA
atgggacgatcaccttgttgcgagaagaacggactcaagaaagggccatggacttcagaggaagaccagaagcttatcgagtatatccaaaaacatggatatggtaactggagaaccctccccaataatgctggtttgcagagatgtggcaagagttgccgattaaggtggactaactatctccgaccagatataaagcgaggaagattctccttcgaagaagaagaaacaattattaagcttcatagtttcttaggaaacaaatggtctgcgattgcggcacgtttgcccggaagaactgataacgagatcaagaacttttggaacacacatataagaaagaagttgattagaatgggaatcgatcctgtgactcacagtccgcgactcgatctcctcgacatctcaaccatcttagcatcatctctatacaattcctcttcacatgaatcacatcatgttaacatgtcaacactcatgatggatgctcatcgtcagcagcaacaatatccattggttaaccccgaaatactcaagctcgctacttctctcttctctcaaaaccaaacccaaaactacatggtggatcatgactcgagcacccacgagaaccatacgggttatcataatgacgttaaccaaaccggagtaaatcaataccaaaccgaccatcaagaactccagtcttgcttgcccccattccccaatgaagctcagtttaataacatggactatcggttcaatggtttcggagaacatactctcgtttcaacctcgaatacgttggtccaagattgcaatattccaacgtttaacgattatgaaagctctagttttgtactagatccttcttattcagatcaaagtttcaacttcactaattcggtcttgaacacaccatcctcaagccccactacgttaaactcatgctccacaacttacatcaacagtaccagttgcaccactgaggatgaaatggaaagctattgcaataatctcatgaagtttgatattccagattttttggacatttgtggtgttatcatatga

SEQ ID NO: 101 - DNA, 858 bp, Brassica napus
  source 1..858: mol_type = other DNA
atgggaagatcaccttgttgtgataagaatggagtgaagaagggaccatggacgtctgaggaggataagaaactcatcgattatattcgatttcatggtccgggcaattggcgtaccctccctaaaaatgctggactccaaaggtgtggaaaaagctgtcgtcttcgttggaccaattatctaagaccagacatcaagagaggaagattttctttcgaggaagaagaaactatcattcagctacacagtgttatgggaaacaagtggtccgcaatagcagctcgtctaccaggaagaaccgataatgaaataaaaaaccattggaatactcacatccgtaagcgacttgtaaggagtggcatcgaccctgttactcactccccacgccttgatcttcttgatatttcctcacttttagcggcacttatcaatcaaccaaacttttcatcagtagcaacacatgcatcgtctctgcttcatcctgatgtattgaggttggcctctcttctcttgccccctcaacaacctctccaagactttaatccaatttacgcaccgaacctagaccaaaatattcaaactccaatcacaacggtgtcgtctcaagactctcagctacaagccgagtgtacaactccagtatcaaataacgaaacttcatctttcgatcctttcatgaaagcaagacttgaggtcagtcatgaagatgtattaccacctttgtcagagagttttgacgtagagtcactcatgtcaacgccacaacaaaatagcattgaagcagaagccaactccagcagtttcttcgactttgggtttccggataattttacccttgaggaatttatgttaaattaa

SEQ ID NO: 102 - DNA, 1032 bp, Brassica napus
  source 1..1032: mol_type = other DNA
atgggaagatcaccttgttgcgagaagaacgggctcaagaaagggccgtggacgtccgaggaagaccagaagctccttgactatatcaagaaacatggatatggtaactggagaaccctccctaaaaatgctggtttgcagagatgtggcaagagttgccgattaaggtggactaactatctccgaccagatataaagcgaggaagattctcctttgaagaagaagaaacaattattcagcttcatagctttttaggaaacaagtggtctgctattgcggcgcgtctgcctggaagaacagataacgagatcaagaatttttggaacacacatataagaaagaagctacttagaatggggattgatccgatgactcacagtccgcgactcgatctcctcgacatctcatccatcttagcatcatctctttacaattcttcttcacgtcatgtgaacatgtcaagactcatgatggatgctcatcgtcagcatcaacagcaacaaccattggttaaccccgaaatactcgagctagctacctctctcttctctcaaaaccaaaaccaaaacttcgtgatggatcatgattccaaaacccatgataaccacacgtcttatcatcatgatgttaaccaaaccggagtaaatcaataccagaccaaccatcaagaactccagtattgcttgccaccattccccagcgaagctcacattaacgatatggatcatcacggagaacatacgtttgctttaaacttgaatacgtcggtccaagattgtgatattcagttgttcaacgactatgcaagctctaattttgtattagaccattcttatctagatcagagcttcaacttcgctgattctgtcctgaacacgccatcctcgagcccgactacgttaaactccagtgccacgacttacatcaagagtagcagttgtagcactgaagatgaaatagaaagctattgcagtaatttcattaagtttgatattcccgatttcctggacgttaatggttttattatatga

SEQ ID NO: 103 - DNA, 1005 bp, Brassica napus
  source 1..1005: mol_type = other DNA
atgggaagatcaccatgtttggataagaaaattgggctcaagaaaggtccatggacaccagaggaagatcaaaagctcattgattatatcaataaacatggttatggaaactggagaactcttcccaagaatgctgggttagagagatgtggtaagagttgtcgtctccggtggactaattatctccgaccagatataaaacgaggaaggttctcatttgaagaagaagaaatcattattcaacttcacagcatcatgggaaacaagtggtctgcaattgcggctagattgccaggaagaacagacaacgagatcaaaaactattggaacactcatatcagaaaaagacttctaaagttaggaatcgatccggtaacacatagtccacgtcttgatcttctggatatctcctccattctcagctcatctgtctacaattcttctcatcatcatcaacaaaacatgttgaggcttatgatgggtgatgggcatcatcatcatcagccattagtcaacccggagatactcaagctcgcaacgtctctcttttcaaattctcaacaacaatacaagaatcagaacaaccccaccaatacacacgaggttaaccaacccgaagtaaaccaataccaaaccgcctacaatattattggtaatcaagaattacaatcttgcttccctagcatggatcaatttgcagagtttcaagaccccatgccaacgacgacgtttccagattcagtgcattcgctcccattgaaccaggactatgattattcgacatctaacttcgcgttagaacctttttactctgactttgcttcggtcttggccacaccctcttcgagcccgactccattagactcaagctccacaacttacatcaatagtagcacttgcagcaccgaggatgaaaaagagagttattgcaataataacttcatgaatagttctgaaataggtcctgattattcgtttgatgttaatggttttctgcaattctaa

SEQ ID NO: 104 - DNA, 1014 bp, Glycine max
  source 1..1014: mol_type = other DNA
atgggaagagctccttgttgtgacgagaatggactcaagaagggtccatggacaccagaggaagaccttaaactcaccaactacattcagattcatggaccaggcaattggcgatccctccctaaaaatgctggcctacgaaggtgtggcaagagttgccgccttcgatggacaaattacctgagacccgatataaagagaggaagattctccttagaagaagaagatgttatcattcagttgcacagtatcttgggaaacaaatggtcagctatagcagctaggttgccaggaagaactgacaacgaaataaagaactattggaacacccacattaggaagaggctacttcgaatgggaattgacccagtcacacataccccacgccttgacctacttgacatgtcctctattttaaggtcaatgttgggtaacccctcccttttgaacatgcaaggcttattaggtgcacaagttttgatgaaccaagggttgttaaagctggcttccacagcctctcttctatcaacaattaacaatgatgaaaacccaaatttggcttcacagaattttgtacatagccaagttgctaccaccccaccatcattagactcaactcagtttcaatttcaaatgccaactaatcagacaaacaatgtggaagtggaaggattcttgggcaccgtgacgaacttgagctgttcaagttctccttcgggtgatgataagattaaccttgttttgcaacaaaaaaaccaagttgatttgttagggaaccatgatgttttggtgcactctctttacaatgcaaaaaaccaaaatatggggtgtgattcagttatgcgtacgcctgtgtcaagtccaaaccggttgaactcatcatccaactatgtgaaaagtggcacggaggaagagagggagagcttttgcagtgacttgttcgagtttgaaattccagagagtttggactttgctgatattttttgcaatgtcccatatacaccaataaattga

SEQ ID NO: 105 - DNA, 1017 bp, Glycine max
  source 1..1017: mol_type = other DNA
atgggtagatcaccttgttgtaacaaaaatggcctcaagaaaggaccatggacaccagaagaagaccaaaaacttattgattacattcagaaacatgggtacggcaattggagagtactcccaaagaatgctggtttgcaaaggtgtggaaagagttgccgtctccgttggacaaactatctccgaccagatataaagcgaggtcaattcacttttgaagaggaagagactataatacagctacatagcattcttggcaacaagtggtcagctattgcttctcgcttacccggaagaacagacaatgaaatcaagaattactggaacacccacattagaaaaaggcttctaaggatgggaattgaccctgtgacacataggccaaggcttgatcttttggacctatcttccatcttaagttcaaccctctacggttcaacacaaatgaacatccaaagacttcttggcactaacacagtggtgaaccctgagcttctaaagttggcctcgtcacccttcccctctctgcagcaacgccaacaccaaaacatgtgtgcacaaaattgtgaagagaaccatctctgtgacccccaaattcagaaccaaatccctcaggacttggctcaagaagcattgcctttcaatcatacacagtttgttgaatccaatatgaatattattccatacccttcaattttccaagactctagcttccaacaacattctcaaccaagtgatttgcattgcaacggaattgatcatacaagttatgttcctcaattaccaaactatgattaccctccaatttctgaactctcaacttataacaattcctataacaacaaccagaacttcagctacacttcagttctctcaacgccttcttcaagtcccacaccgttgaattcgaactcgacgtatgtcaatgggtgcagcagcactgaggatgagacagaaagctatgtcagtagcaacaacttgttgagatttgaaatcccagatatgctatgcgtatga

SEQ ID NO: 106 - DNA, 1035 bp, Glycine max
  source 1..1035: mol_type = other DNA
atgggtagatcaccttgttgtgacaaaaatggcctcaagaaaggaccatggacaccagaagaagaccagaaactctttgattacattcagaaacatgggtacggcaattggagagtactcccaaagaatgctggtttgcaaaggtgcggaaaaagctgtcggcttcgttggacaaactatctccgaccagatataaaacgaggtcgattcactttggaagaggaagagaccataatacaactacatagcattcttggcaacaagtggtcagctattgctactcgcttacccggaagaacagacaatgaaatcaagaattactggaacacccacattagaaaaaggcttctaaggatgggaatggaccctgtgacacataggccaaggcttgatcttttggacctatcttccatcctaagttcatctctctatggttcaacacaaatgaacatccaaagacttcttggcactcacacggtggtgaaccctgaggttctaaagttggcttcatcactcttcccctctcagcaacgcgaaaacatcaacatgtgtgcacaaaattgtgaagagaaccagctctgtgacccccaaattcagagccaaatccctcatgacttggctcaagaagcattgcctttcactcatgcacagttggttgaatccaatacgatgaacacatacccttcaattttccatgaatctggcttccaacaacattattctcaactaagtgatttgcattacaacggaattgatcataaaagctatgttcctcaattaccaagctatgattaccctccaatgtctgaatcctcaacttataacaattcctataataacagcaaccagaacttcagctacgcttcagttctttcaacgccttcttcaagtcccacaccgttgaattcgaactcgacgtttgtcaaggggagcagcagcactgaggatgagacagaaagctatgtcagtagcaacaacttgttgagatttgaaatcccagatatgctacgtatgaatgagtactcatataattaa

SEQ ID NO: 107 - DNA, 972 bp, Glycine max
  source 1..972: mol_type = other DNA
atgggaagagttccttgctgtgacaagaatggactcaagaagggtccatggacaccagaggaagatcttaaactcaccaactacattcagtttcatggaccaggcaattggcgatccctccctaaaaatgctggcctaaaaaggtgtggcaagagttgccgccttcgatggacaaattaccttagacccgatataaagagaggaagattctccttagaagaagaagatatcatcattcagttgcacagtatcttgggtaacaaatggtcagctatagcatcaaggttaccaggaagaaccgacaacgaaataaaaaactattggaacacccacattaggaagaggctacttcgaatgggaattgacccagtcacacacaccccacgccttgacctacttgacatgtcctctattttaaggtcagtgttcgggaaaccctcccttttgaacatgcaaggcttattacgtgcccaagctttgatgaaccaagggttactaaagctggcttccactgcctctcttctatcaacaatcaacaatgatgagaacccaaatttggcttcacacaattatgtacaaaaccaagttaccaccccaccatcattagactcagcacagtttcaatttcaaatgcctactactcagacaaacaatgtggaagtcttctcgggcaccgtggcaaacttgagctgttcaagttctccttcgggtgatgagaaccttgttttgcaacaaaaccaagttggtttgtcagggaaccatgatgctttggtgcactctctgaacaatgcaaaccaaaacatggagtgtgattcggttctgcctacgcctgtgtcaagtccaaaccggttgaattcatcatccaactatgtaagaagtggcacggacgaagagagggatagcttttttagtgacttgttcgagtttgaaattccagagagtttggatgacattgctgatatttttttgtaa

SEQ ID NO: 108 - DNA, 987 bp, Glycine max
  source 1..987: mol_type = other DNA
atgggaagagcaccctgttgtgacaagaatgacctcaaaaagggtccatggactcctgaggaggatctcttgctcaccaactacattcagacttatggaccaggaaattggcgaaccctccccaagaatgctggtctacaaagatgtggcaagagttgtcgccttagatggactaattaccttagacccgatatcaagagagggaagttctcatttgaagaagaagaggccatcattcagcttcacagtgtcttgggaaacaagtggtcggctatagcagctaagttaccggggagaaccgacaacgaaataaagaactattggaacacaaacattaggaagaggttgcttcgaatgggaattgacccagttacacacgctccacgccttgatcttcttgacatgtcctcgattctaaggtcagcaataggaaccgttaacccatcgtttctgaatctgcaaggcctattgggtgcccaagcgttgatgaacccagaattttttaagctcgctgccactgccacacttttatctttgaagaatcatgagaacgcatcaaacttagtttcacaagtgcaacaacaattcaataataatgctgggaatggtcaagtacagaaccaagttgctgctccaaatcagtttcagacaccaactctaagcaacaacaacgtgaacaatggcttatcatcaatttccccagagaattcatcaattccttcttatcttggggagaataattaccagctgaatgctcaacaaattaaccaagttgatttgcttctggaccccgaattggaacattacttaaacagtataaaccaaaacataggccatgaatcagttacacctttgtcaactcctacctcattgaattcatcgtccacgtatgtgaatagttgcgcggaggaagagagggacacctattgcagcgatgtattcaagttagaaattccagagagtcttgacattagcgatttcttgtaa

SEQ ID NO: 109 - DNA, 1128 bp, Glycine max
  source 1..1128: mol_type = other DNA
atggggagagcaccttgttgtgacaagaatggcctcaagaaaggaccatggacaaccgaggaggaccagaaactcattgattacattcagaaacatggatatggcaattggaggacactcccaaagaatgctgggttgcaaaggtgtggaaagagttgccgtctccgttggacaaactatctacgaccagatataaagcgaggtcggttttcatttgaagaggaagagacaataattcaactacatagcattcttggcaacaaatggtctgccattgcatctcgcttaccaggaaggactgacaatgaaataaagaattattggaacactcacattagaaaaaggcttctgaggatgggaattgacccagtgacacacagtcctcgacttgatctattggacatcaattccattctaaacgcatctttctatggttcatcacaaatcaacatccaaaggctccttggcatgcaccagtacgtggtgaaccctgagcttttaaaattggcttcttcactcttctccacctcgcagcaacacaatcatgaccctgatgacatgtgtgctcaaaaaggtcaacagaatcagctttgcgatcctcaaattcagaaccatgttccacactttgtccaatatcaagatccaattcaagaagtgcctgcatgcagcaccatgttcagcaccccttgtttttcaatgcctctaactcaaccacagttggttgagccaaataatgtggaccaatatacatcatcaactttcacagacttcagttaccaacaactaagtgattggcacaaagatgggattgcgttaagcaccttaacagatgactatatgcctcagttatcaagctataataattattatagttctaatagtcatcaaaatctcatgtatcctcaagtgtccgaaccttcaacttttcattccaataacagcaatcatcagaacttcagcttcgcttcagttctatcaacaccttcgtcaagccccacaccgctgaattcgaactccacgataatcaatgggagcaacacagaagacgagagagaccaaagctatgacagtagtaacatgttgaaatttgaaatcccagatattttagatgtgaatgagttcatgtaa

SEQ ID NO: 110 - DNA, 975 bp, Glycine max
  source 1..975: mol_type = other DNA
atgggaagagcaccttgttgtgacaagaatggcctcaaaaaaggtccatggacttccgaggaggatctcttgctcaccaactacattcaaactcatggacctggaaattggagaaccatccccaagaatgccggtctacaaagatgtggcaagagttgtcgccttagatggactaattaccttagacccgatatcaagagaggaaggttctcatttgaagaagaggaggccatcattcagcttcacagtgtcttgggaaacaagtggtcggctatagcagctaggttgccggggagaaccgacaacgaaataaagaactattggaacacgcacgttaggaagaggttgcttcgaacgggaatagacccagttacacacgctccacgcctcgatcttcttgacatctcctcgattctaaggtcagcaattggcaacgttaatccatcgattctgaatctgcaaggcctattgggtgcccaagcgttgatgaacccagagtttttgaagctcgctgccactgccacacttttatctctaaagaataatgagaacccatcaaacttagtttcacaagtacaacaacaattcaatagtgctgggaattgtctagtacaaaaccaagttgctgctccaaatgatccgtttcagacaccaactcacgtgaacaatggcttatcatcaagttcccccgagaattcaattctttcccatcttggggagaataataattaccagctgaatgctcaacaaattaaccaagttgatttgcttctggaccatgaattggaacattacttaaactgtgtaaaccaaaacattggctatgaatcagttacacctttgtcgaccccaaccccattgaattcatcatccacgtatgtgaatagcagcacggaggaagagagggacacctattgcagcgatatattcaagttagaaattccagagagtcttgacattagtgatttcttgtaa

SEQ ID NO: 111 - DNA, 1107 bp, Glycine max
  source 1..1107: mol_type = other DNA
atgggaagagcaccttgttgtgacaagaatggtctcaagaaagggccatggacaaccgaggaggaccagaaactcattgattacattcagaaaaatggatatggcaattggaggacactcccaaagaatgctgggttgcaaagatgtggaaagagttgccgtctccgttggacaaactatctccggccagatataaagcgaggtcggttttcatttgaggaggaagagacaataattcaactacatagcattcttggaaacaagtggtctgcgattgcatctcgcttaccaggaaggacagacaatgaaataaagaactattggaacactcacattagaaaaaggcttctgagaatgggaattgaccctgtgacacacagtcctcgacttgatctattggacatcaattccattctaaacgcatctttctatggttcatcacaaatcaacatccaaagactccttggcatgcaccagtacatggtgaaccctgagcttttaaaattggcttcttcactcttctccacctcacagcagcaacacaatgaccctgatgacatgcctgctcaaaaaggtcaattacagaaccagctttgtgatcctcaaattcagaatcatgttccacactttgtccaatttcaagatccggttcaagaggtgcctgcatgcagcaccatgttcagcaccccttgtgtttcaattcctctaactcaaccacagttggttgagccaaataatgtggaccaatatccatcgtcaactttcacagacttcagttaccaacaactaagtgattggcaactatcaagcttaacagatgattatgtccctcaattatcaagctataattattatagttctgatggtcaaaatctcatgtatgatccattgtccgagccttcaaattttcattccaataacagcaatcagaacttcaggttcgcttcagttctatcgacaccttcgtcaagccctacaccgctgaattcgaactccacgataatcaatgggagcaacacagaagacgagagagatcaaagctatgacagtagtaacatgttgaaatttgaaatcccagatattttagatgtgaatgagttcatgtaa

SEQ ID NO: 112 - DNA, 984 bp, Gossypium hirsutum
  source 1..984: mol_type = other DNA
atgggtaaacctccaggttgtgacaaaaatggattgaagaaaggtccatggactgcagaagaagatcaaaaattgattgattatattcaaaaacatggccatgggagatggcgtaccctccccaaaaatgcagggttgaagagatgtggaaagagttgcaggcttcgctggactaattacttaaggcctgatatcaagagggggaagttctcaatcgaagaagatgaagttaaagttataatacaattacacagtgtgttaggaaacaagtggtcagccattgctgctcgactgccaggaagaacagataacgagataaaaaactattggaacactcatatcaagaagaaactattgagaatggggatcgatcctgtaactcatgctcctcgacttgatctgctcgaactctcttcacttctcagttcatctctttacaattcttccttaaatccagcaggttttgtcggatcaatgtttaaccctagtttcctcagcttagccactgctttcttatcatcaaaccaaaccaaaaacctggaaattaataaccttgcaggagatatccaacaaatacagaacccttatgaaccttaccagggaaaccaggttcctgttataacccaggtttcacaagctgatttgaaccagttttctgcaaatcctggtctgccaaatttgtggcaaatagacaataatgttagtgattcaaagggctttttgccgaccaccatgcaaaacattaatggctacaaccatgggtttaatttaggtgatcaaaacctgcaacaggtatgtactttttctgagaaaataccaaatttggtgccttttggatcgcttttatccacaccatcttcaagctcgactcctttgaacaatggtagcagtactgaagatattgaaagggatagttattgcagcagcaacaacctgttgatctttgatgttcctaagggattaaatgtcaatggaagcatgtaa

SEQ ID NO: 113 - DNA, 903 bp, Gossypium hirsutum
  source 1..903: mol_type = other DNA
atggggagaacacctggctgcgacaaaaatggcctaaagaaaggtccctggactcccgaggaagatcttaagcttattaattatattcagattcatggcgccggacattggcgtaacctccccaagaatgctgggctccaaagatgtggaaagagctgccgtctccgttggacgaactacctgagacctgatataaagagaggaaggttttcattcgaagaagaagagactataattcaactacacagtgttttaggaaataagtggtccgccattgcttgtcggttgccggggaggactgacaatgagatcaagaattactggaatacacatataaggaaaaggcttgcaaggaatggaatcgatcctgtaacacatgctcaacgtcttgatttagttgacttgtcttcttccattattagctcattattaggtgtccaagctctcctaaatcctcaactgttaagcttagctaacaccctcttgtcgttaaaacaagaaaacccagaattattactacaatatcttcaacaaaaccagcttcttcaaactcccacgttagaaccactaagccaacttcttcaagctcccatgacagactgtagcgatcaaaattcccagaaaagtaatgtattagtttcgcaaccaaattatgaacattctaatccaaatccaacggtaccatcacttgtatctgacaattcagatttccattcaatggatggtagccagaattttgggttggattcagtgaggttcacgccgatatcaagtccaactccgttgcattcatcatctacattcatcaacaacagctacactacccattacgaaatagaaagattcaacagtttgctcaaatatgaaattccagaaagtttgaatattaatgaccttttgtaa

SEQ ID NO: 114 - DNA, 1080 bp, Gossypium hirsutum
  source 1..1080: mol_type = other DNA
atgggaagatcaccttgttgtgataaaaatgggctcaaaaaagggccatggacgccggaagaagatcagaagttgattgattatattcaaaaacatgggtatggaaattggaggacgctgccgaagaatgccggtcttcaaagatgtggaaagagttgccgtcttcgatggactaattacttgagacctgatatcaagagaggaagattttctttcgaagaagaagagactataattcagctacacagtatattgggcaataagtggtcggctattgctgctcggttgcctggaagaacagacaatgaaataaaaaactattggaacacacacattagaaagaggcttcttcgcatgggaatagatccggtgactcatagtcctcggctggacctactcgacctatcctccatactaagctcatctttttacaaccaatcccaaatgaacatttcaaggttactgggtgtgaattccttggttaacccagagcttctaaggctggccacttctttcatgtcatctcaacgtgaaaaccaaaaccacaagttcatctttgatcataatgttgaagataaccagctttggagctcccaagtccaggaccagtatcaacaaccattaatgcagtctaaccataatcatctgccaacgcaagtccaagaaatcccagcttgtagtattcctttttccaatgaagcagagctcatgaatctggaccaattcccatcaaatttctcacacttaaatgactggcaaagcaatgcaatgccttcgaatttgacggaggattacgtgccgctaccgacaaactatgactattacgccactgatcatcatcatcatcaaaccgtgaaggatccttcatcatccgaaacctcaaatttccaatccaacaacagcaaccagagtttcagcttcgcgtcagttttatcaacgccttcctcaagtccaactcaattgaattccaactcaacatacgtcaacaatagcggcattgaagaagaaccagatagctactgcagcgacattttaaagtttgaaatcagagatagtttggatgttaatgatttcatgtag

SEQ ID NO: 115 - DNA, 921 bp, Gossypium hirsutum
  source 1..921: mol_type = other DNA
atgggaagagcactttgttgtgataaaaatgggctcaaaaaagggccatggactcctgaagaagataaaaaattgattgattatattcaaaaacatggttatggaaattggaggacacttccaaagaatgctgggttgcaaagatgtggaaagagttgtcgtcttcgatggactaactacttgaggcctgatatcaagagaggaaggttttcttttgaagaagaagagactataattcagctacatagtatattgggcaacaagtggtctgccattgctgctcggttgcccggaagaacagataacgaaataaaaaactattggaacacacacattagaaaaattcttcttcgaatggggatcgatccggtgacccatactcctcgactggatcttctcggtctctctttccttcacaaccaatatcttatccagtcttttgctaaccctgagcttcttcgtaatgttgaccaatatcaaccattgatgcaatctaaccatttccatgcacaagtcgaagaaaccccaacttgtagtgttccattttataacgaagaacaacaactcgtgatgaaacccaacttgaaccaattcccatcaaatttcaatgactatgttatgccttcaattttgactgaagattacgtgccgctaccgccgcagtacaactattacggctcggattatcaaaccgtaatggacccttcaatcgaaacctcgaatttccattccatcaacagcaaccagagcttggggttggggtcagttgtgtcgacgccttcgtcgagccccgccccattgaattcagacttcgcatacctcaacagtagcagcaccactgaaaacgaaacagaaagctattgcaccaacattttgaagtcggaaatccctgatattttggatgttaatgatttcatgtaa

SEQ ID NO: 116 - DNA, 948 bp, Gossypium hirsutum
  source 1..948: mol_type = other DNA
atgggaagagcaccttgctgtgataaaaatggtctgaagaaaggtccatggacacctgaagaagatcagaaacttatcgattatattcaaacacatggttatggtaattggagaacattgcccaagaatgctgggttacaaaggtgtggaaagagttgtcgtcttcgttggactaattatttaagacctgacataaaacgaggcaggttttcatttgaagaagaagaagccataactcaactccatagtgtgttgggcaacaagtggtctgccatagctgcacggttgccgggaaggacagataatgaaataaagaactattggaacacacatattaggaagaggttgcttcgaatggggattgatccagtgacacacagtccacgattggatcttcttgatttgtcttcaatcttaggttgttgttctttttataaccagtctcaaatgaacatgtcgacgaggttgctcgggggcggcggtggtgttcaacccttggtgaaccctgagattctaaggttagccacgtctatcatgtcatcacctcaacgtgaaaaccaaaacccagattttcttttccacgaaaatcaataccagcaaccgccattaatgcaaaacacaaatgtagcagaaccggtgatgaacaacaaccctaatgtaataatagatcagttcccatttaatggctgtttcactgactggcaaaacaatgccaatgccgtactcccatatttgaccgaagataattacgttccggtaccgtcaaactgttacggcggcggaaacggagaaccgagcttcaggacgccgtcttcatcgagtccaacgccgttgaattcaaataattcaacgtacattaacagtagcagcactgaagatgaaagctatagcagtgatatattgaagtttgaaatcccagattttttggatgttaatgaattcatgtaa

SEQ ID NO: 117 - DNA, 1074 bp, Gossypium hirsutum
  source 1..1074: mol_type = other DNA
atggggagagcaccttgctgtgacaaaactggcctcaagaaaggtccatggactcccgaggaagatcttaagcttactaattatattcagagtcatggccctggaaactggcgtaccctccctaagaatgctggtctcgaaagatgtggaaagagctgccgtctcagatgggcaaactaccttagacctgatatcaagagaggaaggttttcctttgaagaagaagaaaccataattcaacttcacagtatcttgggcaacaagtggtcagctattgccgctcgtttgccaggaaggacggacaatgaaatcaagaactactggaacacgcatatcaggaaaaggcttctaagaaatggaatagatccagtgacgcatgctccacgccttgatatgcttgacctttcctccattctcacctcaactttgtgcaaccaatctcttctcaatgcgtcaaacttgttaggtgcacaacctctcctaaacccacaactgctacggctagctaatactctcttatctttgaaacaagagaacccagatatacttgtgcaatatctccacaaaaaccagctctctaattctcagcaacatctggttcccagctccttacaaccaagtcagcttcaagttcaatccaccatccaaaatgattccacatgcaccacatctactcccattcctagtacttgggcgctaaaccaaatagaactcatgcaaaacaatgcaacagggatttcttccaatatgaaaagcttcagttgcccagatacccaagaaacattgacttctactttaactaatgcctgtgcttcgcttccaaaatatgtgcactgtagtccaaatccgacagatccctttacatctgagaattctaacgtccaatcaatagggggcagccagatgtttagctttgattctgtgaggtcaacgccaataagaagtccatctccgttgaattcaccgtcaacattcatcaacagcagcagcagtgtcgatgacgagagagaaagcttcagcagcttgctcaagtttgaaattcctgatagtttggatatcagtgattttatgtaa

SEQ ID NO: 118 - DNA, 765 bp, Gossypium hirsutum
  source 1..765: mol_type = other DNA
atgggtaaacctccaggttgtgacaaaaatggattgaagaaaggtccatggactgcagaagaagatcagaaattgattgattatattcaaaaacatggccatggcagatggcgtaccctccccaaaaatgcagggttgaagagatgtggaaagagctgcaggcttcgctggactaattacttaaggcctgatatcaagagggggaagttttcaatcgaagaagatgaagttataatacaattacacagtgtgttaggaaacaagtggtcagccattgctgctcgattgccaggaagaacagataacgagatcaaaaactattggaacactcatatcaagaagaaactattgagaatggggatcgatcctgtaactcatgctcctcgacttgatctgctcgaactctcttcacttctcagttcttctctttacaattcttccttaaatccagcaggttttgtcggatcaatgtttaaccctagtttcttcagcttagccactgctttcttatcatcaaaccaaaccaaaaacctggaaattaataaccttgcaggaaatatccaacaaatacagaacccttatgaaccttaccagggaaaccaggttcctgttataacccaggtttcacaagctgatttgaaccagttttctgcaaatcctggtctgccaaatttgtggcaaatagacaataatgttagtgattcaaagggtttttgccgaccaccatgcaaaacattaatggctacaaccatgggttttatttag

SEQ ID NO: 119 - DNA, 1026 bp, Gossypium hirsutum
  source 1..1026: mol_type = other DNA
atggtggtcatcgttgcttttttcatctaccatttccacttttcgccaccttcacttcttctccaagccatctcacaccttcacgtaaacttcaccatccttttttttttccaaggaaaatcaatggggagaacaccttgccgcgacaaaaatggcctcaagaaaggtccctggactcccgaggaagatcttaagcttattaattatattcagattcatggcgccggacactggcgtaaactccccaagaatgctgggctccaaagatgtggaaagagctgccgtctccggtggacgaactacctgagacctgatataaagagaggaaggttttcatttgaagaagaagagactataattcaactacacagtgttttaggaaataagtggtccgccattgcttgtcggttgccggggaggactgacaatgagatcaagaattactggaatacacatataaggaaaaggcttgcaaggaatggaatcgatcctgtaacacatgctcaacgtcttgatttggttgacttgtcttcttccattattagctcattattaggtgtccaagctctcctaaatcctcaactgttaagcttagctaacaccctcttgtcgttaaaacaagaaaacccagaattactactacaatatcttcaacaaaaccagcttcttcaaactcccacgttagaaccacgaagccaacttcttcaagctcccatgacagactgtagcaatcaaaattcccagaaaagctatgtattagtttcgcaaccaaattatgaacattctaacccaaatccaacggttccatcacttgtatctgacaattcacatttccattcaatggatggtagccagaattttgggttggattcagtgaggttcacgccgatatcaagtccaactccgttgcattcatcatctacattcatcaacggcagctacactacccattacgaaatagaaagattcaacagtttgctcaaatatgaaattccagaaagtttgaatattaatgaccttttgtaa

SEQ ID NO: 120 - DNA, 1080 bp, Gossypium hirsutum
  source 1..1080: mol_type = other DNA
atggggagatcaccttgttgtgataaaaatgggctcaaaaaagggccatggacgccggaagaagaccagaagttgattgattatattcaaaaacatgggtatggaaattggaggacgctgccgaagaatgccggtcttcaaagatgtggaaagagttgccgtcttcgatggactaattacttgagacctgatatcaagagaggaagattttctttcgaagaagaagagactataattcagctacacagtatattgggcaataagtggtcggctattgctgctcggttgcctggaagaacagacaatgaaataaaaaactattggaacacacacattagaaagaggcttcttcgcatgggaatagatccggtgactcatagtcctcggctggacctactcgacctatcctccattctaagctcatctctttacaaccaatcccaaatgaacatttcaaggttactgtgtgtgaattccttggttaacccagagcttctaaggctggccacttctttcatgtcatctcaacgtgaaaaccaaaaccacgagttcatcgttgatcacaatgttgaagacaaccagctttgcagctcccaagtccaggaccagtatcaacaaccattaatgcagtccaaccataatcatctgccaacgcaagtccaagaaatcccagcttgtagtattcctttttccaatgaagcagagctcatgaatatggaccaattcccatcaaatttctcacacttaaatgactggcaaagcaatgcaatgccttcggatttgacggaggattacgtgccgctaccgccaaactatgactattacgccactgatcatcatcatcatcaaaccgtgaaggatccttcatcgtccgaaacctcaaatttccaatccaacaacagcaaccagagtttcagcttcgcgtcagttttatcaacgccttcctcaagtccaactcaattgaattccaactcaacatacgtcaacaatagcggcattgaagaagaaccagatagctactgcagcaacattttaaagtttgaaatcagagatgttttggatgttaatgatttcatgtag

SEQ ID NO: 121 - DNA, 921 bp, Gossypium hirsutum
  source 1..921: mol_type = other DNA
atgggaagagcactttgtggtgataaaaatgggctcaaaaaagggccatggactcctgaagaagataaaaaattgattgattatattcaaaaacatggttatggaaattggaggacacttccaaagaatgctgggttgcaaagatgtggaaagagttgtcgtcttcgatggactaactacttgaggcctgatatcaagagaggaaggttttcttttgaagaagaagagactataattcagctacatagtatattgggcaacaagtggtctgccattgctgctcggttgcccggacgaacagataacgaaataaaaaactattggaacacacacattagaaaaattcttcttcgaatggggatcgatccggtgacccatactcctcgactggatcttctcggtctctcttcccttcacaatcaatatcttatccagtcttttgttaaccctgagcttcttcataatgttgaccaatatcaaccattgacgcaatctaaccattgccacgcacaagtcgaagaaacccaaacttgtagtgttccattttataacgaagaactacaactcgtgatggaacccaatgtaaaccaattcccatcaaatttcaatgactatgttatgccttcaattttgactgaagattacgtgccgctaccgccgcagtacaactattacggctcggattatcaaaccgtaatggacccttcaatcgaaacctcgaatttccatcccatcaacagcaaccagagcttggggttggggtcagttgtgtcgacgccttcgtcaagccccgccccattgaattcaaactccgcatacctcaacagtagcagcaccactgaagacgaaacggaaagctattgcaccaacattttgaagtttgaaatccctgatattttggatgttaatgatttcatgtaa

SEQ ID NO: 122 - DNA, 948 bp, Gossypium hirsutum
  source 1..948: mol_type = other DNA
atgggaagaacaccttgctgtgataaaaatggtctgaagaaaggtccatggacacctgaagaagatcagaaacttatcgattatattcaaacacatggttatggtaattggagaacattgcctaagaatgctgggttacaaaggtgtggaaagagttgtcgtcttcgttggactaattatttaagacctgacataaaacgaggcaggttttcatttgaagaagaagaagccataattcaactacacagtgtgttgggcaacaagtggtctgccatagctgcacggttgccgggaaggacagataatgaaataaagaactattggaacacacatattaggaagaggttgcttcgaatggggattgatccagtgacacacagtccacgattggatcttcttgatttgtcttcaatcttaggttgttgttctttttataaccagtctcaaatgaacatgtcgacgaggttgctcggcggcggcggcggtgttcaacccttggtgaaccctgagattctaaggttagccacgtctatcatgtcatcacctcaacgtgaaaaccaaaacccagatattcttttccatgaaaatcaataccagcaaccgccattaatgcaaaacacaaatgtagcagaaccggtgatgaacaacaaccctaatgtaataatagaccagttcccatttaatggctgtttcactgactggcaaaacaatgccaatgccgtactcccatatttgaccgaagataattacgttccggtaccgtcaaactgttacggcggcggaaacggagaaccgagcttcaggacgccgtcttcatcgagtccaacgccgttgaattcaaataattcaacgtacatcaacagtagcagcactgaagatgaaagctatagcagtgatatattgaagtttgaaatcccagattttttggatgttaatgaattcatgtaa

SEQ ID NO: 123 - DNA, 1074 bp, Gossypium hirsutum
  source 1..1074: mol_type = other DNA
atggggagaacaccttgctgtgacaaaactggcctcaagaaaggtccatggactcccgaggaagatcttaagcttactaattatattcagattcatggccctggaaactggcgtaccctccctaagaatgctgggctcgaaagatgtggaaagagttgccgtctcagatgggcaaactaccttagacctgacatcaagagaggaaggttttccttcgaagaagaagaaaccataattcaacttcacagtatcttggggaacaagtggtcggctattgccgctcggttgccaggaaggacggacaatgaaattaagaactactggaacacgcatatcaggaaaaggcttctaagaaatggaatagatccagtgacgcatgctccacgccttgatttgcttgacctttcctccattctcacctcaactctgtgcaaccaatctcttctcaatgcgtcaaacttgttaggtgcacaacctctcctaaacccacaactgctacggctagctaatactctcttatctttgaaacaagagaacccagatatacttgtgcaatatctccacaaaaaccagctctctaattctcagcaacatcttgttcccagctccttacaaccaagtcagcttcaagttcaatccaccatccaaaatgattccacatgcaccacatctactccagttccttgtacttcggcgctaaaccaaatagaactcatgcaaaacagtgcaacagggatttcttccaatatgacaagcttcagttgcccagatacccaagaaccattgacttctactttaactaatacctgtgcttcgcttccaaactatgtgcactggagtccaaatccgacagatccctttacatctgaaaattccaacgtccaatcagtagggggcagccagatgtttagctttgattctgtgaggtcaacgccaataacaagtcctactccgttgaattcaccgtctacattcatcaacagcagcagcagtgtcgatgacaagaaagaaagcttcagcagcttgctcaagtttgaaattcctgatagtttggatatcagtgattttatgtaa

SEQ ID NO: 124 - DNA, 1107 bp, Oryza sativa
  source 1..1107: mol_type = other DNA
atggggcgggcgccgtgctgcgagaagagcgggctgaagaaggggccgtggacgcccgaggaggacgagaagctcatcgcctacatcaaggagcacggccagggcaactggcgcacgctccccaagaatgccgggctctcgaggtgcgggaagagctgccggctgcggtggacgaactaccttaggccggacatcaagcgtggtcgcttctccttcgaggaggaggaggccatcatccagctccacagcatcctcggcaacaagtggtcagcgatcgcggcgcggctgccgggccggacggacaacgagatcaagaactactggaacacgcacatccgcaagcgcctcctccgcatgggcatagaccccgtgacccacgcgccgcgtctcgacctcctcgatctcacctccctcctcaagcccgccgccgccgccgcgtactaccccacgcaggccgacctcgacacgctccgcgcgctcgagccgctcgccggctacccggacctgctccgcctcgcctccgccatcctccccgccgccacgacgaccggcgcagccgccgccgccgccgccgagcaggcgcagcttctcctgccgtggctgcttcaggcgcagatggcgcagcagcaacagcaggtgacgccgccgccgccgccgccgccgcaggccgcggcgaccgaacagttcttgcaggccaccagcaccgcctgccaccaaatgccaggcctggttcacgccagcccgacgcagcagctggcgcagcaaccgcaggatcacatggcggcggcgacctgccaccgccgcggcgccgtgcagcacccgagctacgacaaccagctcgactacgtgccggcgctgatgcagatggcgtccgacgcgtccaacctgcagcagtggagcagcacggtctcgagtagcaacaaccacaacgtcaactccggcgtgtccacgccgtcgtcgagcccagcagccgccggacagatcaactcatcctctacgacgacgacgacgacgtatggcttgaacgcgagcggtgacgtcgacgacgctgggctgctcatcaacatgcacctatccgagctcctcgacgtgagcgactacatgtaa

SEQ ID NO: 125 - DNA, 984 bp, Lotus japonicus
  source 1..984: mol_type = other DNA
atgggaagagcaccttgttgtgacaacaaaagtggactcaaaaaaggtccatggacacctgaagaagataacttgctcatcaactatattcaaactcatggacctggaaattggcgaaatctcccaaaaaatgctggtctgcaaagatgtggcaagagctgtcgccttcgatggacaaattacctgaggcctgatatcagaagaggaagattttcctttgaagaagaagagaccatcattcagctacacagtgtcttagggaacaagtggtctgctatagcggctcgattgccaggaagaacagacaatgaaatcaagaactactggaacacccacatcagaaagagactactccgaatgggaattgatcctgtaactcacgctccacgcctggatcttcttgacatgtccaatgttctcagaacagcattaactaacccagcgtttctgaaccttcaaggcttgtttggtgctcaatcgttggtgaaccctgaattgttaaagctagcagctactgccactttgttatctttaaagaatgacaacacaggcttgatttcacaaaatccacaacaaatcaatggtatcatgaattgtcatcaggtgcagaaccaagttgtcccaccagagtttacaacgagccagctccaaacaccgattcaaagcaacaacatggcgatgaacatgagcagttcaagttctccggagaattcaaattcgattaacccttcgtattttggtgacggtttggtacctcaacaataccaagttgataatttgcaacagaacctggaatctgtgtatcaaaacatgatgggatatggctcagttctgtcaacgcctttatctaccccaggaaccacgacgctaaattcaccggccaactttgcgaatagcagcgcagaggaagagagggacacttattgcagcgacatgttcaaattcgagattcctgagagtctagacattagtgacttcttgtaa

SEQ ID NO: 126 - DNA, 999 bp, Lotus japonicus
  source 1..999: mol_type = other DNA
atggggagagcaccatgttgtgacaagaatggcctcaagaaaggaccatggacacaagaggaagaccagaaactcatcgattacattcagaaacatggctatggcaactggagaatactcccaaagaatgctggattgcaaaggtgtggaaagagttgtcgtctccgttggacaaattatctccgaccagatattaagcgaggtctattctcttttgaagaagaggagacaataattcatcttcatagcattcttggcaataagtggtctaccattgcttctcgtttgccaggaaggacagacaatgaaatcaagaattactggaacacccacattagaaaaaggctcctgaaaatgggaattgatcctgtcacacatagcccaaggcttgatcttttggacctctcttctatcctaagttcacctctctatggctcatcacaaatgaacatgtaccctgagattctaaagctggcatcatcactcttctcctcctctcatcagcaaaaccaagacctcaacatttgtgaccaaaataatggtcaagagcatcataaccaatccttcaatcctcaaattcagaaccaacaaatccaaccttgtgtttcaatgcctttcaatcaatcacgattggttgagtccaatttgaacccatacccatcgatttcccctgacttttgcttccaacaacattctcagctaagtgattggcagcattgcaatggaattggttcaagcaccaaaacagaggattttgtccctcaattaccatgctataattactacaattctgattgttatgcaaacaacaacaaccagaacatgagcttctcttcagttctaccaacaccttcgtcaagtcccacaccattgaattcaaactcgacctataaaaatgggagcagtatcactgaagatgagacagaaagctttgtcagcagcaacaacatattgagatttcaaatccaagatatgttatgtgtgagtgagttcttgtaa

SEQ ID NO: 127 - DNA, 1035 bp, Lotus japonicus
  source 1..1035: mol_type = other DNA
atggggagaacaccttgttgtgaaaagaatggcctcaagaaagggccatggacttccgaggagaaccagaaactcattgattacattcagaaacatggatatggcaactggagaacactcccaaagaatgctgggctgcaaagatgtggaaagagttgccgtctccggtggacaaactatctccggccagatataaagcgaggtcggttcacatttgaagaggaggagacaataattcagcttcatagcattcttggcaacaagtggtctgcaattgcatctcggttaccaggaagaacagacaatgaaatcaagaactattggaacactcacattagaaagaggcttctgaagatgggtattgatcctgtgacacacgctccacgccttgatctattagacctctcttcgatcctctattcatctctctctggttcatcacaaatcaaccttcagaggctcctttccatgcagatgaatccagagcttctaaatttggcttcctcactcaacatgacgagtgttgttggtcaaaatggtcaacacaacaacaacaacaaccagttctacaacccccaaatccagagccaaattctacattttgatcaagaccctgttcaagattgtaacacattcagcaccagttgtgtttcattgccacaattggactcatatccatcaaatttcaccgactttggctaccaacaaaattctcagcaaagtgataattgggacagtaatgaaattgcttatgtccctcaattaccgagctatgatcattattatggttctgataatcaaaatttcatgtgtcctccattgtcagaagcttcaacgtttcattccaataacagcaatcagaacttcagctttgcttcagttctgtcgacgccatcgtctagtcccacaccgttaaattcaaactccacgtatgtcaacgggagcaacacagaggatgaaagagaaagctatgatagtagtcacatgttgaaatttgaaatcccagacattttagatgtcaatgagttcatgtaa

SEQ ID NO: 128 - DNA, 624 bp, Raphanus sativus
  source 1..624: mol_type = other DNA
atggcacgatcaccttgttgcgagaagaacggactcaagaaagggccatggacttcagaggaagaccagaagctaattgagtatatccagaaacatggatatggtaactggagaaccttccctaaaaaagctggtttgcatagatgtggaaaaagttgtcgattaaggtggactaactatctccgaccagatataaaacgaggaagattctccttcgaagaagaagaaacaattattaaacttcatagttttttaggaaacaaatggtctgcaattgcggcgcgtttgcctggaagaactgataacgagatcaaaaacttttggaacacacatacaagaaagaagttactaagaatggggatcgatccagtgactcacagtcttcgacttaatctcctcgacatctcaaccatcttagcatcatctcaatacaattcctcttcgcatcacgtgaacatgtcaacactcatgatggattctcatcgtcagcagcaacaatatccattggttaaccccgaaatactcaagctcgctacttctctcttctcccaaaaccaaaaccaaaatcaagtggtggatcatgacccaagcacccacgtaaaccatgttgataagcttgaataa

SEQ ID NO: 129 - DNA, 555 bp, Raphanus sativus
  source 1..555: mol_type = other DNA
atgggaagatcaccatgtttggagaaaaaaattaggctcaagaaaggtccatggactccagaattgccaggaagaacaaacaacgagatcaaaaactattggaacactcacatgagaaaaagacttctaaagttgggaatcgatccggtagcacatagtccacgtcttgatcttctggatatcacctccattctcagctcgtctgtctacaactcttctcatcatcatcaagaaaacatgttgaggctcatgatggagttccaggacctcatgccaatgactacagtccaagattcaatgcctttgttcccattgaaccagccagatgattattcgacatctaactttgctttggaacctttttactcggactttgcttcggtcttgcccacaccctcttcgagcccaactccattagactcaagttccacaacttatatcaatagtagcccttgcatcaccgaggatgaaaaagagagttatagcaataataacttcatgagtacttctgaaacgtgtccggattattcgtttgatgttaatgggtttagataa

SEQ ID NO: 130 - DNA, 1059 bp, Raphanus sativus
  source 1..1059: mol_type = other DNA
atgggaagatcaccttgctgcgagaagactggcctcaagaaagggccatggacgtctgaggaagacaagaagcttgttgactatatccagcaacatggatatggtaactggagaactctcccccaaaatgctggtttgcagagatgtggcaagagttgtcggttaagatggactaattatctccgaccagatataaaacggggaagattctccttggaagaagaagaaactattattcatcttcatagctttctaggaaacaaatggtccgctattgcggcgcgtttgcctggaagaaccgataacgagatcaaaaacttttggaacacacatattagaaaaaagttgcttagaatgggaatcgatccagtgactcacagtccacgacttgatctcctcgacatctcatccatattggcatcatcactatgcaactcctcttcacatcatgtgaacatgtcaagactcatgatggatactcatcgtcagcaacaacaacattcgttagttaaccccgagatactcaaactcgctacctctctattttctcaaaaccaaacccaaaatcacaaccaaaaccaaaacttcgtggtggatcatgacacaaataaccaagagcaccattcggtttatcaccaagatgttaacgaagctggagtaaatcagtaccaaaccgaccatcaagattaccaatcttgcatgccgccattccccaatgaagctcagttcaacgacatgggtcatcagttcaatattttcggagaacaaaatctcgcttcaacctcgaatacatcagttcaagattgcaatattccatcgttcaacgactatgcaaactctggttttgtattagatccttcttactcggacaagagctttagcttcgctaattcggtcttgaacacaccatcctcaagcccgactacattacactccagttctacgacttacatcaacagtagcagttacaacactgaggatgaaatagaaagctattgcagtaatctcatgaagttcgatattcccgatttcttggatgtcaatgattttctcatataa

SEQ ID NO: 131 - DNA, 867 bp, Raphanus sativus
  source 1..867: mol_type = other DNA
atgggaagattaccttgctgtgacaagaatggagtgaagaaaggtccatggactcctgaggaggatcagaaactcatcgactatatacgagttcatggtcccagcaactggcgcattctccctaaaaatgctggactccaaagatgtggaaaaagctgccgtcttcgatggactaattatctaagaccggacatcaagaggggaagattctccttcgaggaagaagaaactatcattcagctacacagtgttatgggaaacaagtggtccgcaatagcagctcgtctaccaggaaggactgacaacgaaattaaaaaccattggaacactcacatccgcaagcggcttgtaaggagtggcatcgaccctgtaactcactccccgcgtcttgatcttcttgatttgtcctcacttctagccgcgattttaaaccaaccaaacttttcatcagtagcaacacatgcatcgtctctgcttaatcctgatgtattgaggttggcttctcttctcttgccccctcaacagccacttccaaaccctaatacactttacgcatcgaacctcgaccaaaatcttcaaactccaaacacatcagtatcgtctcaagacactcaaccacaagccgagtgtacaactccaacaatggacgaaacttcatattttgagcctgtgaacgcaagactcgaggtcggtccttcggatgtattaccacctctgtcagagagtttggacttagactcactcatgtcaacgccaaattattctccacaacaaaataacattgaagcagaagccaactccagcagtttattcgactttgggtttccggataatattacctttgatgactttatggggttactttaa

SEQ ID NO: 132 - DNA, 870 bp, Raphanus sativus
  source 1..870: mol_type = other DNA
atgggaagattaccttgctgtgacaagaatggtgtgaagaaaggtccatggactcctgaggaggatcagaaactcattgactatatacgagttcatggtcccggcaactggcgcattctccctaaaaatgctggactccaaaggtgtggaaaaagctgtcgtcttcgatggactaattatctaagaccggacatcaagagaggaagattctccttcgaggaagaagaaactatcattcagctacacagtgttatgggaaacaagtggtccgcaatagcagctcgtctaccaggaaggactgacaacgaaattaaaaaccattggaacactcacatccgcaagcggcttgtaaggagtggcatcgaccctgtaactcactccccgcgtcttgatcttcttgatttgtcctcacttctagctgcgattttaaaccaaccaaacttttcatcagtagcatcacatgcatcgtctctgcttaatcctgatgtattgaggttggcttctcttctcttgccccctcaacaaccacttccaaaccctaatacactttacgcatcgaacctcgaccaaaatcttcaaactccaaacacaccagtatcgtctcaagacactcaaccacaagccgagtgtacaactccaacaaaggacgaaacttcatattttgagcctgtgaacgcaagactcgaagtcggtccttcagatgtattaccacctctgtcagagagtttggacttagactctctcatgtcaacgccaaattattctccacagcaaaataacattgaagcagaagccaactactccagtagtttattcgactttgggtttccggataatcttacctttgatggctttatggggctactttaa

SEQ ID NO: 133 - DNA, 849 bp, Raphanus sativus
  source 1..849: mol_type = other DNA
atgggaagatcaccgtgttgtgacaagaatggagtgaagaagggaccatggacgtctgaggaggatcagaaactcatcgattatattcgattttatggtcctggcaattggcgtaccctccctaaaaatgccggactccaacggtgtggaaaaagctgtcgtcttcgttggaccaattatctaagaccggacatcaagagaggaagattttccttcgaggaagaagaaactatcattcagctacacagtgttatgggaaacaagtggtccgcaatagcagctcgtttaccgggaaggaccgataatgaaataaaaaaccattggaatactcacatccgcaagcgacttgtaaggagtggcatcgaccctgttactcactccccacgctttgatcttctttatatttcctcacttttagccgtacttatcaatcaacccaacttttcatcagttgcaacacatgcatcgtctctgcttcatcctgatgtattgaggctggcttctcttctcttaccccctcaacaaccactccaaaactttaatccaattcacgaaccgaacctcgaccagaatattcaaactccaatcacatcggtatcgtctcaagactctcagccacaagccgaatgtacaactccatcaaacaacgaagctacatatttcgatcctgtgaacgcaagagtagagggtcatgcagatctattgccacctttgtcagagagttttgacttagagtcacttatgtcaacgccacaacaaaatagtattgaggcaggagccaactccagcagtttcttcgactttgggtttcccgataattttacatttgaggactttatgttaaattaa

SEQ ID NO: 134 - DNA, 1008 bp, Raphanus sativus
  source 1..1008: mol_type = other DNA
atggcacgatcaccttgttgcgagaagaacggactcaagaaagggccatggacttcagaggaagaccagaagctaattgagtatatccagaaacatggatatggtaactggagaaccttccctaaaaaagctggtttgcatagatgtggaaaaagttgtcgattaaggtggactaactatctccgaccagatataaaacgaggaagattctccttcgaagaagaagaaacaattattaaacttcatagttttttaggaaacaaatggtctgcaattgcggcgcgtttgcctggaagaactgataacgagatcaaaaacttttggaacacacatacaagaaagaagttactaagaatggggatcgatccagtgactcacagtcttcgacttaatctcctcgacatctcaaccatcttagcatcatctcaatacaattcctcttcgcatcacgtgaacatgtcaacactcatgatggattctcatcgtcagcagcaacaatatccattggttaaccccgaaatactcaagctcgctacttctctcttctcccaaaaccaaaaccaaaatcaagtggtggatcatgacccaagcacccacgtaaaccaaacaggagtaaaccaataccaaatcaaccatcaagaactccagtcttacttgccgccattccccaatgaagctcagtttaatgacatggaccaacagttcaatggtttcggagaacatactctcgtttcgaatacgtcggtccaagattgcaatattccaacgtttaacgtttatgaaagctctggttttgtgctagatcctttttattcagatcagactttcaacttcgctacctcagtcttgaatacaccatcctcgagccccactatgttaaactcatgctccacaacttacatcaacagtagtagtgacaatattgaagatgaaaaggaacaccattgcaataatcttatgaagtttgatatttccgacttcttggacgttaatggtgttatcatataa

SEQ ID NO: 135 - DNA, 1059 bp, Raphanus sativus
  source 1..1059: mol_type = other DNA
atgggaagatcaccttgttgcgagaagaacgggctcaagaaagggccgtggacgtccgaggaagaccagaagctccttgactatatccagaaacatggatatggtaactggcgaacacttcctaaaaatgccggtttacaaagatgtggcaagagttgtcggttaaggtggactaattatctccgaccagatataaagcgaggaagattctcttttgaagaagaagaggcaattattcagcttcatagctttttaggaaacaagtggtctgctattgcggcgcgtttgcctggaagaacagataacgagatcaagaacttctggaatacacatataagaaagaagctacttagaatggggatcgatccaacgactcacaatccgcgactcgatcttcttgacatctcgtccatcttagcatcatctctatacaattcatcttcacatcatgtgaacatgtcaagagttatgatggatgctcatcatcagcagcaacataatccattggttaaccccgaaatactcaagttcgctaactctctcttttcccaagaccaagaccacaaccacaaccataaccacaaccaaaatcgtaaccaaaactttttggtgaatcatgattccaaaacccacgagaactacacggttaatcatgatgataaccaaaccggagtaaatcaataccagaccaaccatcatgaaatccagtattgcttgccaccattccccgacgaagctcactttaacgatacagatcataatggagaacatatgtttgcttcaaactcgaatatgtctgtccaagattgcaatactcagtcgttgaacgactatgcaagctctagttttgtagtcgaccattcgtatttagatcacaacttcaacatcgcttattcggtcatgaacacgccatcctcaaacccgacgttgaactccagcgtcacgacttacatcaacagtagtagttgtagcaccgaagatgaaatggaaagctattgtagtaatctcatgaaatttgacatttccgattttttggacgttaatgattttattatataa

SEQ ID NO: 136 - DNA, 1038 bp, Raphanus sativus
  source 1..1038: mol_type = other DNA
atgggaagatcaccatgtttggagaaaaaaatcgggctcaagaaaggtccatggactccagaggaagatcaaaagctcattgattatattaagaaacatggttatggaaactggagaactcttcccaagaatgctgggttagagagatgtggtaaaagttgtcggctccggtggactaattatctccgaccagatataaaacgaggaaggttctcctttgaagaagaagaaaccattattcaacttcacagcatcatgggaaacaagtggtctgcaattgcggctagattgccaggaagaacagacaacgaaatcaaaaactattggaacactcacatcagaaaaagacttctaaagctgggaatcgatccggtaacacatagtccacgtcttgatcttcttgatatcacctccattctcaactcatctgtctacagctcttctcatcatcatcaagaaaacatgttgaggctcatgatgggtgatgggaatcatcatcagccattagttaaccccgagatactcaaactcgcaacgtctctgttttcaaattctcaacatcgccaccaaaaccagaacaactccaccacatacgagtttaacacggttaacaaaaccgaagtaaaccaagaccaaaccggttacaatatgattggtaatcaagtattacaatcttgcttccctagcatggatcaattcacagagttccaagacctcatgccagtgactacagtccaagatttaatgcctttgttcccattgaaccaggaagatgtttattcgacatctaacttttctctggaacctttttactcggactttgcttcggtgttgaccacaccctcttcgagcccgacttcactagactcaagttctacaacttacatcaatagtagcacttgcagcactgaggatgaaaaagagagtcattgcaataatttcattagtgcttctgaaatgtgtcctgaatattcgtttgatgttaatggttttctgcaattccaagaaacaaaagaccattgggatatagttatttaa

SEQ ID NO: 137 - DNA, 1089 bp, Setaria italica
  source 1..1089: mol_type = other DNA
atggggcgcgcgccgtgctgcgagaagagcgggctgaagaaggggccgtggacgccggaggaggacgagaagctcgtcgcctacatcaagaagcacggccagggcaactggcgcaccctccccaagaatgctgggctcgcgcggtgcgggaagagctgccggctgcggtggaccaactacctgaggccggacatcaagcgcggccgcttctccttcgaggaggaggagaccatcatccagctccacagcatcctcggcaacaagtggtcagcgatcgcggcgcggctgcccgggcggacggacaacgagatcaagaactactggaacacgcacatccgcaagcgcctgctccgcatgggcatcgaccccgtcacccacgccccgcgcctcgacctcctcgacctctccgcgctcctcaagcccgccgcatactaccccacgcaggccgacctcgacgcgctccgcgccttcgagccgctcgccagctacccggacctcctccgcctcgcctccaccctgctctcgtcgggctcggcggccgcgcccgccgcgatcggcgaccagcagcagcttctgccgtggctgctgcaggcgcagatggcgcaggcggccgccatggcgctgccgcagcaggccgaccatcagttcatgtcgcagcagcagcagcaggccggagccgcgtgccaaatgccggacctggtccacgcgaacccgatggtgcagcagcagcagctggcggccgccgcgcaacagcaacagcaccaggacatggccgcggccgcctgcaatagcatgcaggcgccaccgtccggctacgtggacggcctggacgtcccggcgctgatgcaaatggtccagcccgacgcgtcgaacctgcagcagtggagcagcacggtgacgagcagcaacaacaacaacgtcggctccggcgtgtccacaccgtcgtccagccccgtggcggccgggttgaatcactccgccgcctccaccgccacgacgtacggcggcggcgcgagcgccagcagcgacgccgccgcgctgttcagcatgcagctgtcggagctcctcgatgtgagcgactacatgtaa

SEQ ID NO: 138 - DNA, 1125 bp, Sorghum bicolor
  source 1..1125: mol_type = other DNA
atggggcgcgcgccgtgctgcgagaagagcgggatgaagaaggggccgtggacgcccgaggaggacgagaagctcatcgcctacatcaagaagcacggccagggcaactggcgcaccctccccaagaatgccgggctcgcgcggtgtgggaagagctgccggctgcggtggactaactacctgaggccggacatcaagcgcggccgcttctccttcgaggaggaggagactatcatccagctccacagcatcctcggcaacaagtggtcagcgatcgcggcgcggctgcccggacggacggacaacgagatcaagaactactggaacacgcacatccgcaagcgcctgctccgcatgggcatcgaccccgtcacccacgcgccgcgcctcgacctcctcgacctctccgcgctcctcaagcccgccgccgccgcctactaccccacgcaggccgacctcgacacgctccgcgccttggagccgctcgccaactacccggacctcctccgcctcgcctccaccctgctctcctccggcccgcccgcgatcggcgaccaccaccagaacggccagctcctgccgtggattctgcaggcgcagatggcgcagcaggcggcggctgccatggcgcaacaggtggcgccgccgccgcagcagcaggccgagcagttcatgcaggccggagccgcgtgccaaatgccggacctggtccacatgaactcgaacccgacgacggtgcagcagcagctcgcggccgcgcatcaggacatggccgcggcggcttgccacagcatgcagccacctaataatacgggctacgaggtcgacagcctggacgtcccggcgctgatgcagatggtgcaggccgccgacgcgtcgaacctgcagcagtggagcagcacggtgacaagcagcagcaacaacaacaacaacaacaacaacaacgtcggctccggcgtgtccacaccgtcgtccagcccggtggcgcggttgaatcactccacctccaccaccaccacgacgtacggcggcgcgagcgcgagcacgagcaacgacgccgccgccgccgccgcgctgttcaacatgcagctgtctgagctccttgacgtgagcgactacatgtaa

SEQ ID NO: 139 - DNA, 1050 bp, Thlaspi arvense
  source 1..1050: mol_type = other DNA
atgggaagatcaccatgttgcgagaagaagaatgggctcaagaaaggtccatggactcctgaagaagatcaaaagctcattgattatatcaacaaaaatggttatggaaattggagaactcttcccaagaatgctgggttacaaagatgtggtaagagttgtcggctccggtggacaaattatctccgaccagatataaaacgaggaagattctctttcgaagaagaagaaaccattattcaacttcacagcatcatgggaaacaagtggtctgcaattgcggctagattgccaggacgaacagacaacgagatcaaaaactattggaacactcacatcagaaaaagacttctaaagatgggaatcgatccggtaacacatagtccacgtcttgatcttctcgatatctcctccattctcagctcatctctctacagcagctcttcacatcatcatcttcaacaacatatgaacatgtcgaggctcatgatgggtgatggtcatcatcagcaattagttaacccggagatactcaaactcgcgacctctctcttttcaacctctcagcaacatcatcagaaccagaaccataccacacaagagaaccaaaccgatataaaccaataccaaagtggttacaacatgattggtaaccaagaattacaatcttgcttccctaacatggatcagttcgctgagttccaaggcttcgtgccaacgaagacagtccaagattcaatgccttcgtacccatcataccacgacgatgattattcgaaatctaactttgtgttggaaccttattactccgactttgcttcggtcttgaccacaccttcgtcgagtccgactccactaaactcaaattctacaagttacatcaatagtagcacttgcagcaccgaggatgaaaaagattattgcagtaataacttaatgagtacttctgaaattcctgattattcgtttgatgttaatggttttctgcaattccaagaaacaaaaaaaccattgggacagagttatttaacaaaatattgtattcgttaa

SEQ ID NO: 140 - DNA, 1032 bp, Thlaspi arvense
  source 1..1032: mol_type = other DNA
atgggaagatcaccttgttgcgagaagaacgggctcaagaaagggccatggacgtctgaggaagaccagaagcttgttgactatatccagaaacatggatatggtaactggagaaccctccccaaaaatgccggtttgcagagatgtggcaagagttgtcggttaaggtggactaattatctccgaccagatatcaaacgtggaaggttctcttttgaagaagaagaaaccattattcagcttcatagctacttaggaaacaaatggtcggcgattgcggcgcgtttgcctggaagaacagataacgagatcaagaatttttggaacacacatatcagaaagaagctactaagaatgggtattgatccagtgactcacagtccacgactcgatctcctcgatatctcatccatcttagcatcatctctatacaattcctcttcgcatcatgtggacatatcaagactcatgatggatgctcatcgtcatcagcaacaacatccattggttaaccctgaaatactcaagctagctacgtctctcttctctcaaacccaaaatcaaaatcaaaaccaaaacttcgtattggatcatgactcaaaaactcaagagaccagcacggtttattataatgatgttaaccaaaccggaggacatcaataccaaaccgatcatcaagaacttcagtcttgcatgccgccattccccaatgaagctcaatttaacgacatggatcgtcaattcaatggttttggagaacaaaccctcgcttcaacctcgaacacgtcggtccaagattgcagtgttccatcgttcaacgattatgcaagctcaagtttggtattagatccttcttattcagaccagagcttcaacttcgctaattcggtcttgaacacgccatcctcaagcccgactacttacatcaatagtagcagttgcagcactgaagatgagatggaaagctattgcagcaatctcatgaagtttgatattcccgatttcttggacgttaatggttttattatataa

SEQ ID NO: 141 - DNA, 855 bp, Thlaspi arvense
  source 1..855: mol_type = other DNA
atgggaagatcaccatgttgtgacaagaatggtgtgaagaagggaccatggacgcctgaagaagatcagaaactcatcgattatattcgatttcatggtccgggtaattggcgtatcctccctaaaaatgctggactccaaagatgcggaaaaagctgtcgtcttcgatggaccaattatctaagaccggacatcaagagaggacgattctccttcgaggaagaagaaactatcattcaattacacagtgttatgggaaacaagtggtccgcaatagcagctcgtctaccaggaaggaccgataatgaaataaagaaccattggaatactcacatccgcaagcgacttgtaaggagtggcatcgatcctgttactcacaccccgcgccttgatcttcttgatttgtcttcacttttagccgcacttttcaaccaaccaaacttttcatcagttgcatcgtctctgcttaatcctgatgtattgaggttggcctctctactcttgccacctcaacaaccacatcaaaaccctaatccagtttatgcatcaaacctcgaccaaaatcttcaaactccaatcacttcagtgtcgtctcaagactctcagccacaggccgagtgtgcaactccaacaaacaatgaaaattcatctttcgagcctatgaaagcaagactcgaggtcggtcctgcagatgtatcaccacctttgtcagagagtttggacttagactcactcatgtcaacgccaaactcttctccacaactaaatagcattgaagcagaagccaactccagcagtttcttcgactttggctttccggaaaattttatcttcgacgactttatgttaatttaa

SEQ ID NO: 142 - DNA, 960 bp, Typha domingensis
  source 1..960: mol_type = other DNA
atggggagaccaccttgctgcgataagaatggattgaagaaggggccatggacgccggaggaggacaagaagctcgtcgattacatccacaagcatggccaagggaagtggcgaaaccttccgaagaatgctggtcttgcgaggtgcgggaagagttgccggctccggtggaccaattatttgaggcccgacatcaaacgaggacgcttctcatttgaagaagaagaggccatcatccaactgcacagtgttttggggaacaagtggtcagcaattgcggcatgcttgccagggagaacagacaatgaaatcaagaactattggaacacccacataaggaagaggctactaagtatgggaatagatcccgttactcataaccctcgccttgatctcctggacctctccactcttcttaacccctccgtgtacaacccaaatcaatttgatatctctagtttactcggaatcgggccaattgttaactcggagctcctaaaaatagccagcgatgtcttattatctcagaatcagtactctagccttgtggcaaataccttgcaagagccacatctctcaactgcccaactccaaaatcaatttccttcgttactgcaaggtcaaatatatccaccccaaaacctagctcagtacgttgatgagtcacaactcatgcaagcccaattgcatgacctggagatgtaccatcctggcttcgacaatttgggctccagcattaatccgcagatgtcactttgcgataactccgatgtgcaagagtttaacatccagaattataacctaccatccggcttatcgacgcctgcctccagttcgacgcacttgaactcctcatcgacttatgtaaatggcagcaccgaggacgagagagacagctattgcagcaacttgttcaacctccaaattcctggccttttagatgttagcgattacatgtaa

SEQ ID NO: 143 - DNA, 1050 bp, Triticum aestivum
  source 1..1050: mol_type = other DNA
atggggcgcgcgccgtgctgcgacaggaccgggctgaagaaggggccgtggacgcaggaggaggacgagaagctcgtcgcctacatcaagaagcacggccagggcaactggcgcaccctccccaggaatgccgaccttgagcggtgcgggaagagctgccggctgcggtggaccaactacctccggccggacatcaagcgcggccgcttctccttcgaggaggaggagaccatcatccagctacacagcatcctcggcaacaagtggtcagccattgcggcgaggctgcccggacggacggacaacgagatcaagaactactggaacacgcacatccgcaagcgcctcctccgcatgggcatcgaccccgtcacccacgcgccgcgcctcgacctcctcgacctctcctcgctcctcaagcccgccgcctactaccccacacaggccgacctcgacacgctccgcgccctcgagccgctcgccaactacccggacctcctccgcctcgcctccaccctcctcgcagccccgaccacaacctcctcgcagcccacgaccgaacagcagatgctcctcccttggctgatccaggcgcagatggcgcagcaggtatctcaggcgccgcctcaacatgccacggccgcagacatgttcttgcagcccagctcggcgtgccaaatgccgggtctggttcacgcgaaccccgcgcagcaactacaccaggatcacatggtgccctctgactacgggcagctcccgggctacgacaaccagctcgagctcgactacgtgccggcgctgatgcagatggcgtcagacacgtcgaacctgcagtggagcagcccggtcacaagtagcaacaacaacaacaactgcaacgtcggctccggcgtatccacgccgtcatcgagccccgcggggcgtgtgaactcggcttcaccgacaaccttctgcgccaacgcgagcaacatcgacgccttcagcgccgacgccgccgggctgttcgacatgcacctgtccgatctcctggatgtgagcgactacatgtaa

SEQ ID NO: 144 - DNA, 1047 bp, Triticum aestivum
  source 1..1047: mol_type = other DNA
atggggcgcgcgccgtgctgcgacaggaccgggctcaagaaggggccgtggacgcaggaggaggacgagaagctcatcgcctacatcaagaagcacggccagggcaactggcgcaccctccccaaggatgccgacctggagcggtgcgggaagagctgccggctgcggtggaccaactacctccggccggacatcaagcgcggccgcttctccttcgaggaggaggagaccatcatccagctccacagcatcctcggcaacaagtggtcagccattgcggcgaggctgcccggacggacggacaacgagatcaagaactactggaacacgcacatccgcaagcgcctcctccgcatgggcatcgaccccgtcacccacgcgccgcgcctcgacctcctcgacctctcctcgctcctcaagcctgccgcctactaccccacgcaggccgacctcgacacgctccgcgccttcgagccgctcgccaactacccggacctcctccgcctcgcctccaccctcctcgcagccccgaccacaacctcctcgcagcccacgacccaacagcagatgctcctcccttggctgatccaggcgcagatggcgcagcaggtacctcaggcgccgccgcaacatgccacggccgcagacatgttcttgcagcccagctcggcgtgccaaatgccgggcctggttcacgcgaaccccgcgcagcaactacaccaggatcacgtggtggcctctgactacgggcagctcccgggctacgacaaccagctcgagctcgactacgtgccggcgctgatgcagatggcgtcagacacgtcgaacctgcagtggagcagcccggtcacaagtagcaacaacaacaactgcaacgtcggctccggcgtatccacgccgtcatcgagccccgccgggcgtgtgaactcggcttcaacggcagcgttctgcgccaacacgagcaatattgacgccttcagcgccgacgccgccgggctgttcgacatgcacctgtccgatctcctggatgtgagcgactacatgtag

SEQ ID NO: 145 - DNA, 768 bp, Zea mays
  source 1..768: mol_type = other DNA
atggggcgcgcgccgtgctgcgagaggagcgggctgaagaaggggccgtggacgccagaggaggacgagaagctcgtcgcctacatcaagaagcacggccagggaaactggcgcaccctccccaagaatgccgggctcgcacggtgcgggaagagctgccggctgcggtggactaactacctgaggccggacatcaagcgcggccgcttctccttcgaggaggaggaggctatcatccagctccacagcatcctcggcaacaagtggtcagcgatcgcggcgcggctgcccgggcggacggacaacgagatcaagaactactggaacacgcacatccgcaagcgcctgctccgcatgggcatcgaccccgtcacccacgcgccgcgcctcgacctctccgcgctcctcaagcccgccgccgcgtactaccccacgcaggccgacctcgacacgctccgcgccttggagccgccgctcgccagctacccggacctcctccgcctcgcctccgccctgctctccggccgcccggccgcgcccgcgatcggcgagcaccggcagcagcagcttctgcccggtaacaaccacaacagcgtcggctccggcgtgtccacaccaacgtcttccagcccggtgccgcggttggatcactccaccacctgcgtcgccacgacgttcggcggcggtggcgccagcaccgacgacgtcgccgcgctgttcgacatgcagctgtctgagctgcttgatgtgagcgactacatgctgtaa

SEQ ID NO: 146 - DNA, 1128 bp, Zea mays
  source 1..1128: mol_type = other DNA
atggggcgcgcgccgtgctgcgagaagagcgggctgaagaaagggccgtggatgcccgaggaggacgagaagctcgtcgcctacatcaagaagcacggccagggcaactggcgcaccctccccaagaatgccgggctcgcacggtgcgggaagagctgccggctacggtggactaactatctgaggccggacatcaagcgcggccgcttctccttcgacgaggaggagacaatcatccagctccacagcatcctcggcaacaagtggtcagcgatcgcggcgcggctgcccgggcggacggacaacgagatcaagaactactggaacacgcacatccgcaagcgcctgctccgcatgggcatcgaccccgtcacccacgcgccgcgcctcgacctcctcgacctctccgcgctcttcaagcccgccgccgccgccgcgtactaccccacgcaggccgacctcgacacgctccgagccttggagccgctcgccaactacccggacctcctccgcctcgcctccgccctgctctctggcccgccggcggcgcccgcgatcggcgaccagcaaccgcggcagcttctgccgtggattctgcaggcgcagatggcgcagcaggcggccgccgccgtggcgcaggcgcagctgcaggtggcgccgcaggccgaacagttcgtgcagcagcggcaggcggctggagccgcgtgccaaatgccggacctggtccacacgagcccgacggtgcagcagcaccagcaggtcgcggccgcgcaggagcagcaacaccagccccagggccaggacgacatggccgcggcttgccacagcatgcagccgcagccgcctacgggcggctacgccgtcgacaccctcgacatcccagcgctgatgcagatggtgcaggccgacgacgcgtcgaacctgcagcagtggagcagcatgatcacaagcagcaccaacaacaacaacgtcggctccggcgtgtccacaccgtcgtccagcccggtgccgcgcttgaatcactccaccaccgccaccacgacgtacggcggcgcgagcgatgccgacgccgccgcgctgttcaacatgcagctatctgagctccttgatgtgaccgactacatgtaa

SEQ ID NO: 147 - DNA, 1310 bp, Brassica napus
  source 1..1310: mol_type = genomic DNA
ttatataagaaaatcattaacgtccaagaaatcgagaatatcaaactttacgagattactgcaatagctttccatttcatcctcagtgttgcaactgctactattgatgtaagtcgtggaactggagtttaatgtagtcgggctcgaggatggcgtgttcaagaccgaattagcaaaactaaagctctggtctgaataagaaggatctaatacaaaactagagtttgcatagtcgttgaacgatggaatattgcaatcttggactgatgtattcgaggttgaagcgagagtttgttctccaaaaccattgaactgatgatccatgtcgttgaactgcgcttcattggggaatggcggcatgcaaggttggtaatcttgatggccggtttggtactgatttactccggcttggttaacatcttgatgataaactgagtggtgctcgtgggtatttgtgtcatgatccaccacgaagttttggttttggttgtggttttgggtttgggtttggttttgagaaaagagagaggtagcaagtttgagaatctcggggttaaccaaaggatgttgttgctgttgacgatgagtatccatcatgagtcttgacatgttgacatgatgtgaagaggaattgtatagagatgatgccaagatggatgagatatcaaggagatcaagtcggggactgtgagtcactggatcgatccccattctaagcaacttctttctaatatgtgtgttccaaaagtttttgatctcgttatctgttcttccaggcaaacgtgccgcaatagcagaccatctataataatttattaaaaacaaaacacataagaatttttagactaattcaatattaagaaaatattgtatagacaaaagtaaaattaagctcacttgtttcctaaaaagctatgaagatgaataatagtttcttcttcttccaaggagaatcgccctcgctttatatctggtcggagataattagtccaccttagccgacaactcttgccacatctttgcaaacctgataattaagagaaaaatatacaaaatttaaataacaatttttttagaaaacatcattactaaaagcatggtttaaaatgctagataagagacaaaccagcatttttggggagggttctccagttaccatatccatgttgctggatataatcaacaagcttctggtcttcctcagacgtccatggccctttcttgaggccagtcttctcgcagcaaggtgatcttcccattttagttttgtcgatgattaataattaatctcaaataattggttagttggc

SEQ ID NO: 148 - DNA, 1189 bp, Brassica napus
  source 1..1189: mol_type = genomic DNA
ctaaagcaaccccataaagtcatcaaaggtaaaattatccggaaacctaaagtcgaataaactgctggagttggcttctgcttcaatgttattttgttgtggagaataatatggcgttgacatgagtgagtctaagtcaaaactctctgacaacgggggtaatacatctgaaggaccaacctcgagtcttgcgttcatgataggctcaaaatatgaagtttcatcctttgttggagctgtacactcggcttgtggttgagagtcttgagacgatactgatgtgtttggagtttgaagattttggtcgaggttcgatgcgtaaagtgtattagggttttgaagtggttgttgagggggcaagagaagagaagccaacctcaatacatcaggattaagcagagacgatgcatttgttgcaactgatgaaaattttggttgattgaaaatcgcggctagaagtgaggacaagtcaagaagatcaaggcgcggagagtgagttacagggtcgatgccactccttacaagtcgcttgcggatgtgagtgttccaatggtttttaatttcgttgtcagttcttccaggtagacgagctgctattgcggaccacctatattccatcattcaattcaattagtggtcaataaataatatataactcaccttatattaaaatatataggtcaatacgtatgaataataatagtttagtgaagttgatggcctaaatgttgaaatatacggtccgcatgcatacgtatactctagcttttttcataaaatttaaacctacaaaaaaattgtaactaatgaatcgaatatgatgtgaatgagacttacttgtttcccataacactgtgtagctgaatgatagtttcttcttcctcgaaggagaatcttcctctcttgatgtctggtcttagataattggtccatcgaagacggcagctttttccacacctttggagtcctttagtttgtacaatacgacttataaatgtgtagctcaatttatagagacaatatattatctatcaggagatgtgtctatatacttaccagcatttttagggagaatacgccagttgcccggaccatgaactcgaatataatcgatgagtttctgatcctcctcaggcgtccatggtcctttcttcactccattcttgtcacaacaaggtaatcttcccat

SEQ ID NO: 149 - DNA, 1260 bp, Brassica napus
  source 1..1260: mol_type = genomic DNA
ttatatgataacaccactaatgcccaaaacatctggaatatcaaacttcatgagattattgcaatagctttccatttcatcctcagtgctgcaactgctactatcgatgtaagttgtggagcctgagtttaacgtagtggggctcgaggatggtgtattcaagaccgaattagcgaagttgaaactctgatctgaatgagaaggatctaatacaaaactagagctttcataatcgttaaatgttggaatattgcaatcttggaccgacgcattcgaggttgaagcgaaagtatgttctccgaaaccattgaactgatggtccatgtcattaaactgatattcattggggaatggcggcaagcaagactggagctcttgatggtcggtttgatattgatttactccggtttggttaacgtcatgacgataaagcgtatggttctcgtggtcgtgggtgcttgagtcatgatccaccatgtagttttggttttggttttgagaggagagagaggtagcgaacttgagtatttcggggttaaccaatggatattgttgctgctgacgatgagcatccatcatgagtgttgatatgttcacgtgatgtaaagaggaattggatagagatgacgctaagatggttgagatgtcaaggagatcgagtcgtggactgtgagtcactggatcaatccccattctaagtagcttctttcttatatgtgtgttccaaaagtttttgacctcgttatcagttcttccgggcaaacgcgcagcaatcgcagaccatctataaaaattaatataataaaaatagacataagaatcttaaactagttcaaacttcaaagtaaatattgcctgagaaaaataagtttttttggtagaataaagaaaagacatagttaaactcacttgtttcctaagaaactatgaagcttaataattgtttcttcttcttcgaaggagaatcttcctcgctttatatctggtcggagatagttagtccaccttaatcggcaactcttgccacatctctgcaaacctgataaataagagatgaaacaaaacgattaaaaatgaaacaaaattattactaaaacatgatttaaagttcagattaagagacataccagcatttttggggagggttctccagttaccatatccatgtttctggatatactcgataagcttctggtcttcctctgaagtccatggccctttcttgagtccgttcttctcgcaacaaggtgatcgccccat

SEQ ID NO: 150 - DNA, 1209 bp, Brassica napus
  source 1..1209: mol_type = genomic DNA
ttaatttaacataaagtcctcaaaggtaaaattatccggaagcccaaagtcgaagaaactgctggagttggcttctgcttcaatgctattttgttgtggcgttgacatgagtgactctaagtccaaactctctgccaaaggtggtaatacatcttcatgactgacctcaagtcttgctttcatgaaaggatcaaaagatgaagtttcgttgtttgatactggagttgtacactcggcttgtagctgagagtcttgagacgacaccgttgtgattggagtttgaatattctggtcgaggttcggtgcgtaaattggattaaagttctggagtggttgttgagggggtaagagaagagaggccaatctcaatacatcaggatgaagcagagacgatgcatgtgttgctactgatgaaaagtttggttgattgataagtgcggctaaaagtgaggaaatatcaagaagatcaaggcgtggggagtgagtaacagggtcgatgccactccttacaagtcgcttgcggatgtgagtattccaatggtttttaatttcattatcggtccttcctggtaaacgagctgctattgcggaccacctataatccacgaattcaattagtgatgcatgattaatatatagtttacgttatattaaattataggtcaatgcgtatgaataataatagtttagtagagttgatggcctaactgttggaatgtactgtccgcatgcatatgcatacgtacatcctcgcttttttaattaattaacgtaccaaatttgtagctaatggatctcaaataacttatggtgtaaatgaggcttacttgtttcccataacactgtgtagctgaatgatagtttcttcttcctcgaaggaaaatcttcctctcttgatgtccggtcttagataattggtccaacgaagacgacagctttttccacacctttggagtccttttaagttgtacaatacgacttataagtgtttgattcaatttatagatagaacataatctattaggacaaaactatatatattaataaatcatataattaggtttatatatacttaccagcatttttagggaggatacgccaattgcccggaccatgaaatcgaatataatcgatgagtttctgatcctcctcagacgtccatggtcccttcttcactccattcttatcacaacaaggtgatcttcccat

SEQ ID NO: 151 - DNA, 1217 bp, Brassica napus
  source 1..1217: mol_type = genomic DNA
atgggaagatcaccttgttgcgagaagaacgggctcaagaaagggccgtggacgtccgaagaagaccagaagctccttgactatatccagaaacatggatatggtaactggagaacccttcctaaaaatgctggtacgtctcttaatttacaattttttttaatcatgttttgacttttgagtaatgatgttaagtttcgataattaaatttgtttattcacttaaatattttaggtttgcagagatgtggcaagagttgccgattaaggtggactaactatctccgaccagatataaagcgaggaagattctcctttgaagaagaagaaacaattattcatcttcatagctttttaggaaacaagtgagtatagtgttgtttttgtcctggcaatatatattttctttgaactatttcaagattcttatgtgtttgcatttttataggtggtctgctattgcggcgcgtctgcctggaagaacagataacgaaatcaagaacttctggaatacacatataagaaagaaactacttagaatggggatcgatccagtgactcacagtccgcgactcgatctcctcgacgtctcatccatcttagcatcatctctacacaattcttcttcagatcatttgaagatgtcaagactcatgatggatgctcatcgtcagcatcaacaacaacaaccattgattaaccccgaaatactcaagctcgctacctctctcttctctcaaaaccacaaccaaaacttcgtgatggatcatgaatccaaaatccatgataaccacacggcttatcatcatgatgttaaccaaataggagtaaatcaataccagaccgaccatcaagaactccagtattgcttgccaccattccccaacgaagctcactttaacgatatggatcatcacggagaacatacgtttgcttcaaactcgagtacgtcggtccaagattgcaatattcagccgttcaacgactatgcaagctctagttttgtattagaccattcttatttagatcagagcttcaattttgctgattcggtcttgaacacgccatcctcgagtccaagtatgttaaactccagtgccatggcttacatcaacagtagcagttgtagcactgaagatgaaatggaaaattattgcaataatctcatgaaatttgatattcccaatttcttggacgtcgatggttttattttatga

SEQ ID NO: 152 - DNA, 1205 bp, Brassica napus
  source 1..1205: mol_type = genomic DNA
ttagaattgcagaaaaccattaacatcaaacgaataatcaggacctatttcagaactattcatgaagttattattgcaataactctctttttcatcctcggtgctgcaagtgctactattgatgtaagttgtggagcttgagtctaatggagtcgggctcgaagagggtgtggccaagaccgaagcaaagtcagagtaaaaaggttctaatgcgaagttagatgtcgaataatcatagtcctggtttaatgggagcgaatgcactgaatctggaaacctcgtcgttggcatggggtcttgaaactctgcgaattgatccatgctagggaagcaagattgtaattcttgattaccaataagattgtagccggtttggtattggtttacttcgggttggttaacctcgtgtgtattggtggggttgttctgattcttgtattgttgttgagaatttgaaaagagagacgttgcgagcttgagtatctccgggttgactaatggctgatgatgatgatgcccatcacccatcataagcctcaacatgttttgttgatgatgatgagaagagttgtagacagatgagctgagaatggaggagatatccagaagatcaagacgtggactatgtgttaccggatcgattcctaactttagaagtctttttctgatgtgagtgttccaatagtttttgatctcgttgtctgttcttcctggcaatctagccgcaattgcagaccatctaaaatatagtttatcaagaaagcaaataaagtcagaaaaacatagaaaattaatgcacttgaaaatatgtcaacaaaagggaaacattaaactcacttgtttcccatgatgctgtgaagttgaataatgatttcttcttcttcaaaggagaaccttcctcgttttatatctggtcggagataattagtccaccggagacgacaactcttaccacatctctctaaccctataattaacaagattcgagaaaaaaggttaaaatttttatcaaacaaaaatgaataaaagtattaagtaaaatgcaataacgaagatcatatatacgaaccagcattcttgggaagagttctccagtttccataaccatgtttattgatataatcaatgagcttttgatcttcctctggagtccatggacctttcttgagcccaattttcttatccaaacatggtgatcttcccat

SEQ ID NO: 153 - DNA, 1310 bp, Brassica napus
  source 1..1310: mol_type = genomic DNA
ttatatgagaaaatcattaacgtctaagaaatcggaaatatcaaactttacgagattactgcaatagctttccatttcatcctcagtgttgcaactgctactattgatgtaagtcgtggaactggagtttaatgttgtcgggctcgaggatggcgtgttcaagaccgaattagcaaagctaaagctctggtccgaataagaaggatctaatacaaaactagagttcgcaaagttgttgaacgatggaatattgcaatcttggaccgatgtattcgaggttgaagcgagagcttgttctccgaaaccattgaactgatgacccatgtcgttgaactgagcttcattggggaatggcggcatgcaaggttggtaatcttgatggccggtttggtactgatttactccggcttggttaacatcttgatgataaactgagtggtgctcgtgggtatttgtgtcatgatccaccacgaagtttaggttttggttgtggttttgggtttgggtttggttttgagaaaagagagaggtagcgagtttgagaatctccgggttaaccaaaggatgttgttgctgttgacgatgagcatccatcatgagtcttgacatgttgacatgatgtgaagaggaattgtacagagatgatgccaagatggatgagatatcaaggagatcaagtcggggactgtgagtcactggatcgatgcccattctaagcaacttctttctaatatgtgtgttccaaaagtttttgatctcgttatctgttcttccaggcaaacgtgccgcaatagcagaccatctataagaatttattaaaaacaaaacacataagaatttttggactaaatcaatattaagaaaatattgtatagacaaaagtaaaattaagctcacttgtttcctaaaaagctatgaagatgaataatagtttcttcttcttccaaggagaatcgccctcgctttatatctggtcggagataattagtccaccttagccgacaactcttgccacatctttgcaaacctgataattaagagaaaaatatacaaaatttaaatatcaaaacttttagaaaacatcattactaaaagcatggtttaaaatgctaaataagagacaaaccagcatttttggggagggttctccagttaccatatccatgttgctggatatagtcaacaagcttctggtcttcctcagacgtccatggccctttcttgaggccagtcttctcgcagcaaggtgatcttcccatttgagttttgtcgatgattaataattaatctcaaataattggttagttggc

SEQ ID NO: 154 - DNA, 1187 bp, Brassica napus
  source 1..1187: mol_type = genomic DNA
ttaaagcaaccccataaagtcatcaaaggtaaaattatccggaaacctaaagtcgaataaactgctggagttggcttctgcttcaatgttattttgttgtggagaataatttggcgttgacatgagtgagtctaagtcaaaactctctgacaaaggtggtagtacatctgaaggaccgacctctagccttgcgttcataggctcaaaatatgaagtttcatcctttgttggagctgtacactcggcttgtggttgagtgccttgagacgacactgatgtgtttggagtttgaagattttggtcgaggttcgattcgtaaagtgtattggggttttgaagtggttgttgaggaggcaagagaagagaagctaacctcaatacatcaagattaaacagagacgatgcatttgttgcaactgatgaaaagtttggttgattgaaaattgcggcaagaagtgaggacaagtcaggaagaccaaggcgcggggagtgagttacagggtcgatgccactccttacaagtcgcttgcggatgtgagtgttccaatggtttttaatttcgttgtcagtccttccaggtagacgagctgctattgcggaccacctatatatagtccatcattcaattcaattagtggtcaataacaaatatataactcgccttatattaaaatatataggtcaatacgtatgaataataatagtttagtgaagttgatggcctaaatgttgaaatatacggtccacattcatacgtatactctcgcttttttcataaaattaaacgtacaaaaattgtagctaatggatcgaatatgatgtgaataaggcttacttgtttcccataacactatgtagctgaatgatagtttcttcttcctcgaaggagaatcttcctctcttgatgtctggtcttagataattggtccatcgaagacggcagctttttccacacctttggagtcctttagtttgtacaatacgacttataaatgtacagctcaatttatagagactatatataatctatcaggagatgtgtctatatacttaccagcatttttagggagaatacgccagttgcccggaccatgaagtcgaatataatcgatgagtttctgatcctcctcaggcgtccatggtcctttcttcactccattcttgtcacaacaaggtaatcttcccat

SEQ ID NO: 155 - DNA, 1206 bp, Brassica napus
  source 1..1206: mol_type = genomic DNA
tcatatgataacaccacaaatgtccaaaaaatctggaatatcaaacttcatgagattattgcaatagctttccatttcatcctcagtggtgcaactggtactgttgatgtaagttgtggagcatgagtttaacgtagtggggcttgaggatggtgtgttcaagaccgaattagtgaagttgaaactttgatctgaataagaaggatctagtacaaaactagagctttcataatcgttaaacgttggaatattgcaatcttggaccaacgtattcgaggttgaaacgagagtatgttctccgaaaccattgaaccgatagtccatgttattaaactgagcttcattggggaatgggggcaagcaagactggagttcttgatggtcggtttggtattgatttactccggtttggttaacgtcattatgataacccgtatggttctcgtgggtgctcgagtcatgatccaccatgtagttttgggtttggttttgagagaagagagaagtagcgagcttgagtatttcggggttaaccaatggatattgttgctgctgacgatgagcatccatcatgagtgttgacatgttaacatgatgtgattcatgtgaagaggaattgtatagagatgatgctaagatggttgagatgtcgaggagatcgagtcgcggactgtgagtcacaggatcgattcccattctaatcaacttctttcttatatgtgtgttccaaaagttcttgatctcgttatcagttcttccgggcaaacgtgccgcaatcgcagaccatctattaaaaaaagacacataagaatcttgaactagtttaaagtaaatattgtcggagaaaaaaaaagtaaaactcacttgtttcctaagaaactatgaagcttaataattgtttcttcttcttcgaaggagaatcttcctcgctttatatctggtcggagatagttagtccaccttaatcggcaactcttgccacatctctgcaaacctgataaataagagatgaaacaaaatgattaaaaatggaaacaaaaaacatgatttaaagtgcaaattaagagacataccagcattattggggagggttctccagttaccatatccatgtttttggatatactcgataagcttctggtcttcctctgaagtccatggccctttcttgagtccgttcttctcgcaacaaggtgatcgtcccat

SEQ ID NO: 156 - DNA, 1206 bp, Brassica napus
  source 1..1206: mol_type = genomic DNA
ttaatttaacataaattcctcaagggtaaaattatccggaaacccaaagtcgaagaaactgctggagttggcttctgcttcaatgctattttgttgtggcgttgacatgagtgactctacgtcaaaactctctgacaaaggtggtaatacatcttcatgactgacctcaagtcttgctttcatgaaaggatcgaaagatgaagtttcgttatttgatactggagttgtacactcggcttgtagctgagagtcttgagacgacaccgttgtgattggagtttgaatattttggtctaggttcggtgcgtaaattggattaaagtcttggagaggttgttgagggggcaagagaagagaggccaacctcaatacatcaggatgaagcagagacgatgcatgtgttgctactgatgaaaagtttggttgattgataagtgccgctaaaagtgaggaaatatcaagaagatcaaggcgtggggagtgagtaacagggtcgatgccactccttacaagtcgcttacggatgtgagtattccaatggttttttatttcattatcggttcttcctggtagacgagctgctattgcggaccacctataatccatgaattcaattagtgatgcatgattaaaatatagtttatgttatattaaattatgggtcaatgcgtatgaataataatagtttagtagagttgatggtctaactgttgaaatgcactgtccgcatgcatatgcatacgtacaccctcgcctttttcattaattaatataccaaatttgtagctaatggatctcaaataacttatggtgtaaatgatgcttacttgtttcccataacactgtgtagctgaatgatagtttcttcttcctcgaaagaaaatcttcctctcttgatgtctggtcttagataattggtccaacgaagacgacagctttttccacacctttggagtcctttaagttgtacaatacgacttataagtgtttgattcaattatcgattgaacataatctattaggacaaaactatatatattaataaatcatataataggttcatatatacttaccagcatttttagggagggtacgccaattgcccggaccatgaaatcgaatataatcgatgagtttcttatcctcctcagacgtccatggtcccttcttcactccattcttatcacaacaaggtgatcttcccat

SEQ ID NO: 157 - DNA, 1212 bp, Brassica napus
  source 1..1212: mol_type = genomic DNA
tcatataataaaaccattaacgtccaggaaatcgggaatatcaaacttaatgaaattactgcaatagctttctatttcatcttcagtgctacaactgctactcttgatgtaagtcgtggcactggagtttaacgtagtcgggctcgaggatggcgtgttcaggacagaatcagcgaagttgaagctctgatctagataagaatggtctaatacaaaattagagcttgcatagtcgttgaacaactgaatatcacaatcttggaccgacgtattcaagtttaaagcaaacgtatgttctccgtgatgatccatatcgttaatgtgagcttcgctggggaatggtggcaagcaatactggagttcttgatggttggtctggtattgatttactccggtttggttaacatcatgatgataagacgtgtggttatcatgggttttggaatcatgatccatcacgaagttttggttttggttttgagagaagagagaggtagctagctcgagtatttcggggttaaccaatggttgttgctgttgatgctgacgatgagcatccatcatgagtcttgacatgttcacatgacgtgaagaagaattgtaaagagatgatgctaagatggatgagatgtcgaggagatcgagtcgcggactgtgagtcatcggatcaatccccattctaagtagcttctttcttatatgtgtgttccaaaaattcttgatctcgttatctgttcttccaggcagacgcgccgcaatagcagaccacctataaaagggcaaacacataagaatcttgaaatagttcaaagaaaatatttattgtcacgacaaaatcaaaactatactcacttgtttcctaaaaagctatgaagctgaataattgtttcttcttcttcaaaggagaatcttcctcgctttatatctggtcggagatagttagtccaccttaatcggcaactcttgccacatctctgcaaacctaataattaagtgaagaaaacaaaatttaactatcgaaacttttagataacatcattactcaaaacatggttaaaaatgtaaattaagagacgtaccagcatttttagggagggttctccagttaccatatccatgtttcttgatatagtcaaggagcttctggtcttcctcggacgtccacggccctttcttgagcccgttcttctcgcaacaaggtgatcttcccat

SEQ ID NO: 158 - DNA, 1575 bp, Brassica napus
  source 1..1575: mol_type = genomic DNA
ttagaattgcagaaaaccattaacatcaaacgaataatcaggacctatttcagaactattcatgaagttattattgcaataactctctttttcatcctcggtgctgcaagtgctactattgatgtaagttgtggagcttgagtctaatggagtcgggctcgaagagggtgtggccaagaccgaagcaaagtcagagtaaaaaggttctaacgcgaagttagatgtcgaataatcatagtcctggttcaatgggagcgaatgcactgaatctggaaacgtcgtcgttggcatggggtcttgaaactctgcaaattgatccatgctagggaagcaagattgtaattcttgattaccaataatattgtaggcggtttggtattggtttacttcgggttggttaacctcgtgtgtattggtggggttgttctgattcttgtattgttgttgagaatttgaaaagagagacgttgcgagcttgagtatctccgggttgactaatggctgatgatgatgatgcccatcacccatcataagcctcaacatgttttgttgatgatgatgagaagaattgtagacagatgagctgagaatggaggagatatccagaagatcaagacgtggactatgtgttaccggatcgattcctaactttagaagtctttttctgatatgagtgttccaatagtttttgatctcgttgtctgttcttcctggcaatctagccgcaattgcagaccacctaaaatatagtttatcaagaaagcaaacaaagtcagaaaaacatagaaaattaatgtatcaagcacttgaaaatagtgaaaaatacaaaaatagcactaaatcaagtttttgttctcaaactagcactcaagatcaaaaatcacaaaaatagcacttaatgttttatcaaaagtcataaacttagagtttagagttaaagggtggagtttaggatttagggtttagggtttagagtttagggtttagggtttagagtttagagtttagggtttagagttgagaaatgaggttttggagataagatttcaaattttgaaaaataaaaaaattaaaattttcaaaagataaaatgctattttgatcattttagtttttgagtgctatttttttgatataaacttaaaaatgtgctatttttgaaatttgctcttgaaaatatgtcaagaaaagggaaacattaaactcacttgtttcccatgatgctgtgaagttgaataatgatttcttcttcttcaaatgagaaccttcctcgttttatatctggtcggagataattagtccaccggagacgacaactcttaccacatctctctaaccctataattaacaagattcgagaaaaaaggttaaaaaatttatcaaacaaaaatgaatagaagtattaagtaaaatgcaataacgaagatatatatacgaaccagcattcttgggaagagttctccagtttccataaccatgtttattgatataatcaatgagcttttgatcttcctctggtgtccatggacctttcttgagcccaattttcttatccaaacatggtgatcttcccat

SEQ ID NO: 159 - DNA, 1832 bp, Glycine max
  source 1..1832: mol_type = genomic DNA
aaacgaatcacttttgtgtatcagtagtcagaaccctctttctgtcatttgcaataagacatattaagctagttacccttttggcttttaggaaccatcctacaccatacttcacttttcatctatttagtttgaaaatgggaagagctccttgttgtgacgagaatggactcaagaagggtccatggacaccagaggaagaccttaaactcaccaactacattcagattcatggaccaggcaattggcgatccctccctaaaaatgctggtagatgttcttatttccttctccctacgcttcccattgttttgaaataggaaagatttgaggcctgtcacattaattttaaaagacaaactatatcattaatttttgttccaaaaaaatgtaaatgttgatcaatatatagcctatttggttatatgatgtgattttccatggatgtgattttccatggatgtgattttaagaagctaatagtaaaaatttcaatgtctcaaacatgattatatttactactaagttctcagtaggttttcaaacatggtattagtcatttttgcatcttaacacaaaaataaatgtttcacattttctcaacattttcacggttctgttgttctatctactaattaaggtatatcattatttagtatttactaacatattgattatgttacttaattacaggcctacgaaggtgtggcaagagttgccgccttcgatggacaaattacctgagacccgatataaagagaggaagattctccttagaagaagaagatgttatcattcagttgcacagtatcttgggaaacaagtaagagaagcctatgacaccattttccttcatttatcacaatcttcctaatttaaaaaactaagcttcaatatgaggttgttttatactaattgctaatcgatatggttaatttatgcatggcttatttagatggtcagctatagcagctaggttgccaggaagaactgacaacgaaataaagaactattggaacacccacattaggaagaggctacttcgaatgggaattgacccagtcacacataccccacgccttgacctacttgacatgtcctctattttaaggtcaatgttgggtaacccctcccttttgaacatgcaaggcttattaggtgcacaagttttgatgaaccaagggttgttaaagctggcttccacagcctctcttctatcaacaattaacaatgatgaaaacccaaatttggcttcacagaattttgtacatagccaagttgctaccaccccaccatcattagactcaactcagtttcaatttcaaatgccaactaatcagacaaacaatgtggaagtggaaggattcttgggcaccgtgacgaacttgagctgttcaagttctccttcgggtgatgataagattaaccttgttttgcaacaaaaaaaccaagttgatttgttagggaaccatgatgttttggtgcactctctttacaatgcaaaaaaccaaaatatggggtgtgattcagttatgcgtacgcctgtgtcaagtccaaaccggttgaactcatcatccaactatgtgaaaagtggcacggaggaagagagggagagcttttgcagtgacttgttcgagtttgaaattccagagagtttggactttgctgatattttttgcaatgtcccatatacaccaataaattgatacacatgttagtatatttatagttatctgaagatgtggctagtgtttccccttttagatgcattgcatgtatatatatgtatcgagttttgtagttgaattttgttgttgatacaattggacgtc

SEQ ID NO: 160 - DNA, 1916 bp, Glycine max
  source 1..1916: mol_type = genomic DNA
aagaaaacagacatgcacagtaacatggcaataatagaaacttgaagcgacaaataattggaaaaggatatataaggacttctttttcctaacacatcaaaagcctcaatgcagaaagtcaactaccaatactattaaaaatttagaaaatgttacaagtatgaacacaatcgatccattgtgattatctagctagccccagataaataaatcaattttgttcgagacgattgtttcatgatgtgaataagttaattatatgagtacttagtcatacgcatagcatatctgggatttcaaatctcaacaagttgttgctactgacatagctttctgtctcatcctcagtgctgctgcacccattgacatacgtcgagttcgaattcaacggtgtgggacttgaagaaggcgttgagagaactgaagtgtagctgaagttctggttgttgttataggaattgttataagttgagagttcagaaattggagggtaatcatagtttggtaattgaggaacataacttgtatgatcaattccgttgcaatgcaaatcacttggttgagaatgttgttggaagctagagtcttggaaaattgaagggtatggaataatattcatattggattcaacaaactgtgtatgattgaaaggcaatgcttcttgagccaagtcctgagggatttggttctgaatttgggggtcacagagatggttctcttcacaattttgtgcacacatgttttggtgttggcgttgctgcagagaggggaagggtgacgaggccaactttagaagctcagggttcaccactgtgttagtgccaagaagtctttggatgttcatttgtgttgaaccgtagagggttgaacttaagatggaagataggtccaaaagatcaagccttggcctatgtgtcacagggtcaattcccatccttagaagcctttttctaatgtgggtgttccagtaattcttgatttcattgtctgttcttccgggtaagcgagaagcaatagctgaccacctacacagtaatcccataataccaagttaattacaaaaccctctttcgttattattattagtactttaatcaataataatattggactcatgtccaaaagcaaaaacttattaaataagaactaactaaagaaatctagtttaattgatcgagtaaaatacataaattattgtaaatctctttatatctgttttggattcttacgagaaaaaaatacttattaaacaagtggcttacttgttgccaagaatgctatgtagctgtattatagtctcttcctcttcaaaagtgaattgacctcgctttatatctggtcggagatagtttgtccaacggagacggcaactctttccacacctttgcaaacctactcaatgcaaaataagcaaaacacatacattcatattagttcaagtacaaatagaaaaaacaaaaacttactttatttgtgtgtttaataatgttcatttttggtacaaaagatgaagataaatttatgacataccagcattctttgggagtactctccaattgccgtacccatgtttctgaatgtaatcaataagtttttggtcttcttctggtgtccatggtcctttcttgaggccatttttgttacaacaaggtgatctacccattgtaatttgaacttgttgagctacttaattaagctactatagctaaatgatgagtttgcgtgatagaaaaaaaaagaaagagggagaagcttttggagacgtgagaaaataaagaaagtgtgggagagaaataatggaattatgtttttatgagactcaaggggacgtagttgcttgttgtataaatagcaattaaggagatgaagggtaagaaaaagggcaactcaattggatttggtgccggcctctgtta

SEQ ID NO: 161 - DNA, 1783 bp, Glycine max
  source 1..1783: mol_type = genomic DNA
agtctcatacaaaacattactccattatttctctcccacactttctttattttctcacgtctccaaaacttctgcctttttcccatcacgcaaactcctttagcaagtacctttaacaagttcaaattacaatgggtagatcaccttgttgtgacaaaaatggcctcaagaaaggaccatggacaccagaagaagaccagaaactctttgattacattcagaaacatgggtacggcaattggagagtactcccaaagaatgctggtatgtcatcaatttatatcttcatctttttgtataaaaaaggaacattattaaacacacacataaagtaagtttttgttttttcttgtacttgaactaaaatgaatggcttttgcttattttgaattgagtaggtttgcaaaggtgcggaaaaagctgtcggcttcgttggacaaactatctccgaccagatataaaacgaggtcgattcactttggaagaggaagagaccataatacaactacatagcattcttggcaacaagtaagcctcttgttcaataagtgtcttttttattaataagaatccaacaaaaattaaatacaaaaggtttgtaataatttatacacttttctcaactatttaaattagactcttttaattcattgttgttttataagtttttgcttgtggacatgaggcaaatattattattcatttaaccactggttaataataataaggaaagagggttttgtaattaccttggtattaattattggatttttgtgtaggtggtcagctattgctactcgcttacccggaagaacagacaatgaaatcaagaattactggaacacccacattagaaaaaggcttctaaggatgggaatggaccctgtgacacataggccaaggcttgatcttttggacctatcttccatcctaagttcatctctctatggttcaacacaaatgaacatccaaagacttcttggcactcacacggtggtgaaccctgaggttctaaagttggcttcatcactcttcccctctcagcaacgcgaaaacatcaacatgtgtgcacaaaattgtgaagagaaccagctctgtgacccccaaattcagagccaaatccctcatgacttggctcaagaagcattgcctttcactcatgcacagttggttgaatccaatacgatgaacacatacccttcaattttccatgaatctggcttccaacaacattattctcaactaagtgatttgcattacaacggaattgatcataaaagctatgttcctcaattaccaagctatgattaccctccaatgtctgaatcctcaacttataacaattcctataataacagcaaccagaacttcagctacgcttcagttctttcaacgccttcttcaagtcccacaccgttgaattcgaactcgacgtttgtcaaggggagcagcagcactgaggatgagacagaaagctatgtcagtagcaacaacttgttgagatttgaaatcccagatatgctacgtatgaatgagtactcatataattaatgtattcacatcatgaaacaattgtgtcgaacaaaaattgatttatctggggctagctagctagctagctagataattacaatggatcgattgtgttcatacttgtaacattttctaaatttttaatagtattggtagttgactttctgcattgaggttctcgatgtgttaggaaaaaaaagtccttatccttttccaattatttgttgtttatagtttactattactatgt

SEQ ID NO: 162 - DNA, 1451 bp, Glycine max
  source 1..1451: mol_type = genomic DNA
ttacaaaaaaatatcagcaatgtcatccaaactctctggaatttcaaactcgaacaagtcactaaaaaagctatccctctcttcgtccgtgccacttcttacatagttggatgatgaattcaaccggtttggacttgacacaggcgtaggcagaaccgaatcacactccatgttttggtttgcattgttcagagagtgcaccaaagcatcatggttccctgacaaaccaacttggttttgttgcaaaacaaggttctcatcacccgaaggagaacttgaacagctcaagtttgccacggtgcccgagaagacttccacattgtttgtctgagtagtaggcatttgaaattgaaactgtgctgagtctaatgatggtggggtggtaacttggttttgtacataattgtgtgaagccaaatttgggttctcatcattgttgattgttgatagaagagaggcagtggaagccagctttagtaacccttggttcatcaaagcttgggcacgtaataagccttgcatgttcaaaagggagggtttcccgaacactgaccttaaaatagaggacatgtcaagtaggtcaaggcgtggggtgtgtgtgactgggtcaattcccattcgaagtagcctcttcctaatgtgggtgttccaatagttttttatttcgttgtcggttcttcctggtaaccttgatgctatagctgaccatctaaataagccgttcataaattaaccatattgattagcaattagtataaaacaacctcatattgaagcttaattttttaaatgataaggattgtgataaatgaaggaaaatggtcatagacttcttacttgttacccaagatactgtgcaactgaatgatgatatcttcttcttctaaggagaatcttcctctctttatatcgggtctaaggtaatttgtccatcgaaggcggcaactcttgccacacctttttaggcctgtaattaagtaacataatcaataagttagtatctattaacttcttaaaatcatatccatggaaaatcacatcacacagaaccaaattaatagctataaattgatcaacatggtttacatctttttgaaacaaaaatgataattttgatctattaaaaataacgtgacacacatcaaatatatctttcctatatcaaaacactggggaagggtagggaaaaggaaattataacagataccagcatttttagggagggatcgccaattgcctggtccatgaaactgaatgtagttggtgagtttaagatcttcctctggtgtccatggacccttcttgagtccattcttgtcacagcaaggaactcttcccattttcaaactatatagatgaaaagtgaagcggaagcacggtgcagaatggttggttccaaaaagcctaaagctaggatagcttaatatgtcttatcacaaaactatagaaat

SEQ ID NO: 163 - DNA, 1487 bp, Glycine max
  source 1..1487: mol_type = genomic DNA
aaaaaaccaacccgagtacaaaattctgcatgccccacatatttaaataacaagaataatataatatataaattcaaactaattaaacagcagtgtgcaaattaaacgcaatattcacacagacacatatttacaagaaatcgctaatgtcaagactctctggaatttctaacttgaatacatcgctgcaataggtgtccctctcttcctccgcgcaactattcacatacgtggacgatgaattcaatgaggtaggagttgacaaaggtgtaactgattcatggcctatgttttggtttatactgtttaagtaatgttccaattcggggtccagaagcaaatcaacttggttaatttgttgagcattcagctggtaattattctccccaagataagaaggaattgatgaattctctggggaaattgatgataagccattgttcacgttgttgttgcttagagttggtgtctgaaactgatttggagcagcaacttggttctgtacttgaccattcccagcattattattgaattgttgttgcacttgtgaaactaagtttgatgcgttctcatgattcttcaaagataaaagtgtggcagtggcagcgagcttaaaaaattctgggttcatcaacgcttgggcacccaataggccttgcagattcagaaacgatgggttaacggttcctattgctgaccttagaatcgaggacatgtcaagaagatcaaggcgtggagcgtgtgtaactgggtcaattcccattcgaagcaacctcttcctaatgtttgtgttccaatagttctttatttcgttgtcggttctccccggtaacttagctgctatagccgaccacctaaatatgaacacataaattaaacacataagaacaacaacattcttaaaaaaaataaaattgagaagattaaggaaaatccaagacgtacttgtttcccaagacactgtgaagctgaatgatggcctcttcttcttcaaatgagaacttccctctcttgatatcgggtctaaggtaattagtccatctaaggcgacaactcttgccacatctttgtagacctatgattaatcaacaaatagttcaatatatgttaatattcaataattagataacacaaaaaaaaacttttaataaaaattagaattagaataatcaaaatggtatagctaggtaccagcattcttggggagggttcgccaatttcctggtccataagtctgaatgtagttggtgagcaagagatcctcctcaggagtccatggaccctttttgaggtcattcttgtcacaacagggtgctcttcccattttggaattgaagaagatgaatagcaaaaagtatataatagggtgaatataatgatttctaaaagggcagccgcaaagtgcactcaaacacgacagagaagaaagaaagaaagaaggttgcgctgaaactgaaactcagggaaagtaaacgtttgttgggtct

SEQ ID NO: 164 - DNA, 1811 bp, Glycine max
  source 1..1811: mol_type = genomic DNA
aaggaccctactatcataactccatttttctctccctctcttctctttcttaatttacctattctctcacgtctcaaatattttctcctccatctctcgccagcttcaagatatcactcattgagcaaagtaggtcaaaaaatttgctcaacaaggtaaaacatttattagttagctagcagtatggggagagcaccttgttgtgacaagaatggcctcaagaaaggaccatggacaaccgaggaggaccagaaactcattgattacattcagaaacatggatatggcaattggaggacactcccaaagaatgctggtatgtcaccaaattaaactaaacttaacaaaatggctctctttttttttttttttttgttaatttcaactaataatggttaattttggttcattagggttgcaaaggtgtggaaagagttgccgtctccgttggacaaactatctacgaccagatataaagcgaggtcggttttcatttgaagaggaagagacaataattcaactacatagcattcttggcaacaagtgagttataatttctttctattttttttcttttatagctttcagtcaagttattaattaaataaatgacaactaacttgagtcaaataaatttaagacaacacttacatacagtttaagtgcttttaattaatgttgttcttccatttaaattgaagttttatttctgtaataaatgtttatattaatattattatactaatggattattggatttatgtgtagatggtctgccattgcatctcgcttaccaggaaggactgacaatgaaataaagaattattggaacactcacattagaaaaaggcttctgaggatgggaattgacccagtgacacacagtcctcgacttgatctattggacatcaattccattctaaacgcatctttctatggttcatcacaaatcaacatccaaaggctccttggcatgcaccagtacgtggtgaaccctgagcttttaaaattggcttcttcactcttctccacctcgcagcaacacaatcatgaccctgatgacatgtgtgctcaaaaaggtcaacagaatcagctttgcgatcctcaaattcagaaccatgttccacactttgtccaatatcaagatccaattcaagaagtgcctgcatgcagcaccatgttcagcaccccttgtttttcaatgcctctaactcaaccacagttggttgagccaaataatgtggaccaatatacatcatcaactttcacagacttcagttaccaacaactaagtgattggcacaaagatgggattgcgttaagcaccttaacagatgactatatgcctcagttatcaagctataataattattatagttctaatagtcatcaaaatctcatgtatcctcaagtgtccgaaccttcaacttttcattccaataacagcaatcatcagaacttcagcttcgcttcagttctatcaacaccttcgtcaagccccacaccgctgaattcgaactccacgataatcaatgggagcaacacagaagacgagagagaccaaagctatgacagtagtaacatgttgaaatttgaaatcccagatattttagatgtgaatgagttcatgtaatgtgatcagatagatcttcaatgattaaatcgaccaaaacgttgatcgattatatcacatgtcccccaattgtttttcttttctgggatagcttgattatggatccatgatgtaggttcatacctgtaacatttcttaattttcattattgattaaattttcaaatgtttaaatttct

SEQ ID NO: 165 - DNA, 1597 bp, Glycine max
  source 1..1597: mol_type = genomic DNA
gatttaaagaaataaccaacccgactgcaaaattctgcatgacccacatatttaaataacaagaataatggtacataaatgcaaactaaacagcagagtgcaaattaaacgcaatcacaccgacacatatatttacaagaaatcactaatgtcaagactctctggaatttctaacttgaatatatcgctgcaataggtgtccctctcttcctccgtgctgctattcacatacgtggatgatgaattcaatggggttggggtcgacaaaggtgtaactgattcatagccaatgttttggtttacacagtttaagtaatgttccaattcatggtccagaagcaaatcaacttggttaatttgttgagcattcagctggtaattattattctccccaagatgggaaagaattgaattctcgggggaacttgatgataagccattgttcacgtgagttggtgtctgaaacggatcatttggagcagcaacttggttttgtactagacaattcccagcactattgaattgttgttgtacttgtgaaactaagtttgatgggttctcattattctttagagataaaagtgtggcagtggcagcgagcttcaaaaactctgggttcatcaacgcttgggcacccaataggccttgcagattcagaatcgatggattaacgttgccaattgctgaccttagaatcgaggagatgtcaagaagatcgaggcgtggagcgtgtgtaactgggtctattcccgttcgaagcaacctcttcctaacgtgcgtgttccaatagttctttatttcgttgtcggttctccccggcaacctagctgctatagccgaccacctaaatttgaacacataaatattaaacaacataacacataagcataaaattattttaaaaaaaagtttattttttttaggagattaaggaaaatcaaacagtggagatataaagtgaatttgatgattaaaagagaaaagaaaaatgaaagattatgggttcaatcttttctattaataaaattattattctatccagtaagatttgcccccgataaaaaaataaatcaaacacgtacttgtttcccaagacactgtgaagctgaatgatggcctcctcttcttcaaatgagaaccttcctctcttgatatcgggtctaaggtaattagtccatctaaggcgacaactcttgccacatctttgtagacctgtcattcattaatatatgttaatattcaataattagtggacacataaaacttataataagaattagaagtagaataatgaaaatggggtagatcggtaccggcattcttggggatggttctccaatttccaggtccatgagtttgaatgtagttggtgagcaagagatcctcctcggaagtccatggaccttttttgaggccattcttgtcacaacaaggtgctcttcccattttgaaattgaagcagatgaatagtaaaaagtataatagagtgaatgaatggtttctaaaagtgcagccgcaaagtgcactcaaacacgaaagagaagaattagaaagagggttgtgctgaatgaaactgaaactcaaggaaagtaaacgt

SEQ ID NO: 166 - DNA, 2015 bp, Glycine max
  source 1..2015: mol_type = genomic DNA
agcaataatagaaactttatatgattaaaaaatagataaggacgttggtacttgctaataaagtcatagctcaattaattaagaaatttaaacaatcaatcaataatgaaaattaattaggaaatgttacagttatcaacaccatggatccataatgaagctatcccagaaaaacaattgggagacatgcatgtgatataatcaatcaacgtttcggttgatttgatcgttgaagatctgtctgatcacattaattacatgaactcattcacatctaaaatatctgggatttcaaatttcaacatgttactactgtcatagctttgatctctctcgtcttctgtgttgctcccattgattatcgtggagttcgaattcagcggtgtagggcttgacgaaggtgtcgatagaactgaagcgaacctgaagttctgattgctgttattggaatgaaaatttgaaggctcggacaatggatcatacatgagattttgaccatcagaactataataattatagcttgataattgagggacataatcatctgttaagcttgatagttgccaatcacttagttgttggtaactgaagtctgtgaaagttgacgatggatattggtccacattatttggctcaaccaactgtggttgagttagaggaattgaaacacaaggggtgctgaacatggtgctgcatgcaggcacctcttgaaccggatcttgaaattggacaaagtgtggaacatgattctgaatttgaggatcacaaagctggttctgtaattgacctttttgagcaggcatgtcatcagggtcattgtgttgctgctgtgaggtggagaagagtgaagaagccaattttaaaagctcagggttcaccatgtactggtgcatgccaaggagtctttggatgttgatttgtgatgaaccatagaaagatgcgtttagaatggaattgatgtccaatagatcaagtcgaggactgtgtgtcacagggtcaattcccattctcagaagcctttttctaatgtgagtgttccaatagttctttatttcattgtctgtccttcctggtaagcgagatgcaatcgcagaccacctacacataaatccaataacaaataataactattcattagtgtaataagattaatataacaaatttatgcacaaaacctatggcttgtctcataggtatttttagtgcttttctctaatcagagttagagctttatctagttaatttatgtacaaacatttattacataaattactgaaataaaatttctattttaatattaaaaaaaacattgaaaagcacttaaactgtatgtaagttttgtctcaaatttagttgactgatcaagtttgttgtctcttatttaatagttaacttgatgactaaaaactataaagaaaaaatagaaagaaataataactcacttgtttccaagaatgctatgtagttgaattattgtctcttcctcctcaaatgaaaaccgacctcgctttatatctggccggagatagtttgtccaacggagacggcaactctttccacatctttgcaaccctattcaatgtaatgagccaaaaccattagttgaaatttatacatataatatataaaaaaataggcccatttttctaaatttattttatttagtttaatttcgtgatataccagcattctttgggagtgtcctccaattgccatatccatttttctgaatgtaatcaatgagtttctggtcctcctcggttgtccatggccctttcttgagaccattcttgtcacaacaaggtgctcttcccatactgctagctagctaattaagtagttctgtttgatgagctaataaatgttgagcaaattttataagctactttgctcaatgagttatatcttgaatctgacgagagatggaggagaaaatgtttgagacgggagagaataggtaaagaaagagaagagagggaaaaaaaatggagttatgatagtagggtccgtagtgg

SEQ ID NO: 167 - DNA, 1736 bp, Gossypium hirsutum
  source 1..1736: mol_type = genomic DNA
tttttttcttttgcatccaacttcaccttccttcttatctttctcgaaaaaggcaaattttaagattgtcttaaagaagtgtatatctatctatctatatatatatatatttagaaatgggtaaacctccaggttgtgacaaaaatggattgaagaaaggtccatggactgcagaagaagatcaaaaattgattgattatattcaaaaacatggccatgggagatggcgtaccctccccaaaaatgcaggtatatactccgattcagaacttgtatatacttaaaatcattgagtcaaatattcgagtttatcgattttctttgtagggttgaagagatgtggaaagagttgcaggcttcgctggactaattacttaaggcctgatatcaagagggggaagttctcaatcgaagaagatgaagttaaagttataatacaattacacagtgtgttaggaaacaagtaagtttttagcattaatagtatttggtctaattgtgaattttacccttttctttagaaaaattaagaaatgagtccctccactttaacttaccggaatatttatgaaaatgagaagttaatccaactactaaaccttaccgttaattcaaccaataacttggatttatatgcatgagattaacaaaaattatcactttagtaatttatatgcaataaattaattaaaatcagcaatttatgtgttaatcgaagaaccaaattctaatgtagatgattaactttttaagttttataaagtggaaggagaaaatttagaattatacgtatttcttaatttataattatattagtaaagtcaatgaaacagatgttgtcttatggtgttaccatgtctgattcactactgttttttctttgaaacttaggtggtcagccattgctgctcgactgccaggaagaacagataacgagataaaaaactattggaacactcatatcaagaagaaactattgagaatggggatcgatcctgtaactcatgctcctcgacttgatctgctcgaactctcttcacttctcagttcatctctttacaattcttccttaaatccagcaggttttgtcggatcaatgtttaaccctagtttcctcagcttagccactgctttcttatcatcaaaccaaaccaaaaacctggaaattaataaccttgcaggagatatccaacaaatacagaacccttatgaaccttaccagggaaaccaggttcctgttataacccaggtttcacaagctgatttgaaccagttttctgcaaatcctggtctgccaaatttgtggcaaatagacaataatgttagtgattcaaagggctttttgccgaccaccatgcaaaacattaatggctacaaccatgggtttaatttaggtgatcaaaacctgcaacaggtatgtactttttctgagaaaataccaaatttggtgccttttggatcgcttttatccacaccatcttcaagctcgactcctttgaacaatggtagcagtactgaagatattgaaagggatagttattgcagcagcaacaacctgttgatctttgatgttcctaagggattaaatgtcaatggaagcatgtaatgtttttgaaataaaaaagttcgattttgaagtgtttttaattgtggggattttgactagggttattgcatatttgtaacatctatgtgaaatctttaattattattattattttttagaagtttttgtt

SEQ ID NO: 168 - DNA, 1367 bp, Gossypium hirsutum
  source 1..1367: mol_type = genomic DNA
tcacttcctttccaagccatctcacaccttcacgtaaacttcaccatcttttttttttccaaggaaaatcaatggggagaacacctggctgcgacaaaaatggcctaaagaaaggtccctggactcccgaggaagatcttaagcttattaattatattcagattcatggcgccggacattggcgtaacctccccaagaatgctggtatgtatatgtataaacttgttttcttttgtatttttaaatattgtgtttttcaggctgtgatgatgggttttgtttaaactgtttagggctccaaagatgtggaaagagctgccgtctccgttggacgaactacctgagacctgatataaagagaggaaggttttcattcgaagaagaagagactataattcaactacacagtgttttaggaaataagtaaggtttacactacagtgttttatgatattgttatatgagtgatgaagttggagtttacaaattcattttgtctgtaaatcaggtggtccgccattgcttgtcggttgccggggaggactgacaatgagatcaagaattactggaatacacatataaggaaaaggcttgcaaggaatggaatcgatcctgtaacacatgctcaacgtcttgatttagttgacttgtcttcttccattattagctcattattaggtgtccaagctctcctaaatcctcaactgttaagcttagctaacaccctcttgtcgttaaaacaagaaaacccagaattattactacaatatcttcaacaaaaccagcttcttcaaactcccacgttagaaccactaagccaacttcttcaagctcccatgacagactgtagcgatcaaaattcccagaaaagtaatgtattagtttcgcaaccaaattatgaacattctaatccaaatccaacggtaccatcacttgtatctgacaattcagatttccattcaatggatggtagccagaattttgggttggattcagtgaggttcacgccgatatcaagtccaactccgttgcattcatcatctacattcatcaacaacagctacactacccattacgaaatagaaagattcaacagtttgctcaaatatgaaattccagaaagtttgaatattaatgaccttttgtaaatatatatacatatacacacattatttgtagcttgagtctcagagttttggcttgtaaaactgaagacaccatctttattttttcttttttagatgttttattttattttgttttttttctcagtttattgtgggttcctgggtttgtattatatatatatacatattataattatttgattgtgttacttatattttaaatataatttgttaattttc

SEQ ID NO: 169 - DNA, 1762 bp, Gossypium hirsutum
  source 1..1762: mol_type = genomic DNA
ccgccggcatttttttttctcccctacacaaggaggacacgttgccatagtgataaacagaggacggtgagttacccttcacttgctatttatacaagtacgttgctatacggaccctacatctctttgctgcattttcttctcacttctctttctctctcgctcgcaaggtcttaacccaaagctaaaccttatttctgtaacattataaccaaaagggcaaagctttttttgttgggaagctgtaacagtaagcatgggaagatcaccttgttgtgataaaaatgggctcaaaaaagggccatggacgccggaagaagatcagaagttgattgattatattcaaaaacatgggtatggaaattggaggacgctgccgaagaatgccggtaactattatttttacctattgtattttcttatcttaatttctggttttgatggatgagctatagtgctaattggtttatgtttttttttatttgttaataataataataataggtcttcaaagatgtggaaagagttgccgtcttcgatggactaattacttgagacctgatatcaagagaggaagattttctttcgaagaagaagagactataattcagctacacagtatattgggcaataagtgagtttcttgtttattttcccttggctcttttttacttctataatcctttgttttcttacattgttttgaataatatttacaggtggtcggctattgctgctcggttgcctggaagaacagacaatgaaataaaaaactattggaacacacacattagaaagaggcttcttcgcatgggaatagatccggtgactcatagtcctcggctggacctactcgacctatcctccatactaagctcatctttttacaaccaatcccaaatgaacatttcaaggttactgggtgtgaattccttggttaacccagagcttctaaggctggccacttctttcatgtcatctcaacgtgaaaaccaaaaccacaagttcatctttgatcataatgttgaagataaccagctttggagctcccaagtccaggaccagtatcaacaaccattaatgcagtctaaccataatcatctgccaacgcaagtccaagaaatcccagcttgtagtattcctttttccaatgaagcagagctcatgaatctggaccaattcccatcaaatttctcacacttaaatgactggcaaagcaatgcaatgccttcgaatttgacggaggattacgtgccgctaccgacaaactatgactattacgccactgatcatcatcatcatcaaaccgtgaaggatccttcatcatccgaaacctcaaatttccaatccaacaacagcaaccagagtttcagcttcgcgtcagttttatcaacgccttcctcaagtccaactcaattgaattccaactcaacatacgtcaacaatagcggcattgaagaagaaccagatagctactgcagcgacattttaaagtttgaaatcagagatagtttggatgttaatgatttcatgtaggtccaaaatcaaaactcacaaaaaggagtttccatttatgtgctttcatttttcttttttggactaagtcgggtgggggggtgtcgatacttgtaaaattttctacaaataatttattttgttgtattttttaccctacggcaagatcctaccatttcctcctcctttaaaaaaaaaaaagttatttcaatatcatggaaaggttccattattaatattgcaagtt

SEQ ID NO: 170 - DNA, 1417 bp, Gossypium hirsutum
  source 1..1417: mol_type = genomic DNA
tctctcttctctgtcactaagcaataaacatgggaagagcactttgttgtgataaaaatgggctcaaaaaagggccatggactcctgaagaagataaaaaattgattgattatattcaaaaacatggttatggaaattggaggacacttccaaagaatgctggtaaacctctagcattcatttaccgataggacaccatatgttttgtctacggatgaattatagtacttcttatggacttcacgcctgatgggtttgtaaaatcttttattatagggttgcaaagatgtggaaagagttgtcgtcttcgatggactaactacttgaggcctgatatcaagagaggaaggttttcttttgaagaagaagagactataattcagctacatagtatattgggcaacaagtaagttctgtttacatctttatttgctgttttcagttctattattgtgtttttttcccttaatgttttgtaatgttttaaggtggtctgccattgctgctcggttgcccggaagaacagataacgaaataaaaaactattggaacacacacattagaaaaattcttcttcgaatggggatcgatccggtgacccatactcctcgactggatcttctcggtctctctttccttcacaaccaatatcttatccagtcttttgctaaccctgagcttcttcgtaatgttgaccaatatcaaccattgatgcaatctaaccatttccatgcacaagtcgaagaaaccccaacttgtagtgttccattttataacgaagaacaacaactcgtgatgaaacccaacttgaaccaattcccatcaaatttcaatgactatgttatgccttcaattttgactgaagattacgtgccgctaccgccgcagtacaactattacggctcggattatcaaaccgtaatggacccttcaatcgaaacctcgaatttccattccatcaacagcaaccagagcttggggttggggtcagttgtgtcgacgccttcgtcgagccccgccccattgaattcagacttcgcatacctcaacagtagcagcaccactgaaaacgaaacagaaagctattgcaccaacattttgaagtcggaaatccctgatattttggatgttaatgatttcatgtaattccaaatgcataactcccaaaaagagtttttcttttttctttttttgattcagtgagacatgtcgatacgtgtaaaaatttctactaattaatagttaatttctcttaagatcactgtgttagaagcaacgttctgtcctttttcttttctttactattggtatatcttatcacatatgtattatattattatacagacaagtcatcttattatatactatatatatttattcaattcatatctacttccgaaaataatgaatcaaatca

SEQ ID NO: 171 - DNA, 1820 bp, Gossypium hirsutum
  source 1..1820: mol_type = genomic DNA
atatatacataccacacccccccccccaaaaaaaaaaaaagcttcgttgaaaaaactccaccatgggaagagcaccttgctgtgataaaaatggtctgaagaaaggtccatggacacctgaagaagatcagaaacttatcgattatattcaaacacatggttatggtaattggagaacattgcccaagaatgctggtaaagtactgaatctcttctttacctttatttccattgatgaatatgttatataatggtatgttataatggagttttttttttcggttgttgttgaataaaatagggttacaaaggtgtggaaagagttgtcgtcttcgttggactaattatttaagacctgacataaaacgaggcaggttttcatttgaagaagaagaagccataactcaactccatagtgtgttgggcaacaagtgagtttcatttcagttgtttcagttttggtaaaatcatcatggagacccctaaaggagtcggattatattctcaaaactggtctttctcttaaaaatcaggatacacttagcataaaagaccaatttactctttaacctaacatgtaaggactaatttgccaatttttaaaatagaaggggcaaaatgcaatttaactctcagtcaggggcaaatccaaaatttttttaaaggggcgtaattgaactataactttttgtgtggttaaaatgtaattttatcttgtattaatttaaaatttcgtcacctttgaaagtattaaacagaaatcttttcattttttggaagctaaagtgcaactttatcatatagtgacatttattaagggactaaaaagcaattttcccatttaccttatttttttctataatgtttttgattatatatgtgtaatgtataggtggtctgccatagctgcacggttgccgggaaggacagataatgaaataaagaactattggaacacacatattaggaagaggttgcttcgaatggggattgatccagtgacacacagtccacgattggatcttcttgatttgtcttcaatcttaggttgttgttctttttataaccagtctcaaatgaacatgtcgacgaggttgctcgggggcggcggtggtgttcaacccttggtgaaccctgagattctaaggttagccacgtctatcatgtcatcacctcaacgtgaaaaccaaaacccagattttcttttccacgaaaatcaataccagcaaccgccattaatgcaaaacacaaatgtagcagaaccggtgatgaacaacaaccctaatgtaataatagatcagttcccatttaatggctgtttcactgactggcaaaacaatgccaatgccgtactcccatatttgaccgaagataattacgttccggtaccgtcaaactgttacggcggcggaaacggagaaccgagcttcaggacgccgtcttcatcgagtccaacgccgttgaattcaaataattcaacgtacattaacagtagcagcactgaagatgaaagctatagcagtgatatattgaagtttgaaatcccagattttttggatgttaatgaattcatgtaatttgcaaaaaaaaaattaaaattaaaaaaatcaaaatactcacaaatgaggttttgattttttggattcagtgaaggggttgttgttgttgttgatacgtgtaaaaccttctgctaatttttttttttggctgttgttgtgatttttctcaagcttactgtattaggaagtaaggtcctacctttttttaatttagtcctttttattatattgaaaagtttcccattattgatatgtccctac

SEQ ID NO: 172 - DNA, 1509 bp, Gossypium hirsutum
  source 1..1509: mol_type = genomic DNA
cagtacaaccaaaaggaactacaaaaaaaataaacaagccgaaaacccaaacactgagaatgaagattctttcagtatcacaagtccaacctctaatatgttatttacataaaatcactgatatccaaactatcaggaatttcaaacttgagcaagctgctgaagctttctctctcgtcatcgacactgctgctgctgttgatgaatgttgacggtgaattcaacggagatggacttcttattggcgttgacctcacagaatcaaagctaaacatctggctgccccctattgattggacgttagaattctcagatgtaaagggatctgtcggatttggactacagtgcacatattttggaagcgaagcacaggcattagttaaagtagaagtcaatgtttcttgggtatctgggcaactgaagcttttcatattggaagaaatccctgttgcattgttttgcatgagttctatttggtttagcgcccaagtactaggaatgggagtagatgtggtgcatgtggaatcattttggatggtggattgaacttgaagctgacttggttgtaaggagctgggaaccagatgttgctgagaattagagagctggtttttgtggagatattgcacaagtatatctgggttctcttgtttcaaagataagagagtattagctagccgtagcagttgtgggtttaggagaggttgtgcacctaacaagtttgacgcattgagaagagattggttgcacaaagttgaggtgagaatggaggaaaggtcaagcatatcaaggcgtggagcatgcgtcactggatctattccatttcttagaagccttttcctgatatgcgtgttccagtagttcttgatttcattgtccgtccttcctggcaaacgagcggcaatagctgaccacctgatattcataacacaagctagagtgtgtaaggtccaagatcatcataatatgaaaatgactgcccaacaatataatattgaccacacactacatgttgtaatgaaaattttaaatagagaaaaagactctaatcatacttgttgcccaagatactgtgaagttgaattatggtttcttcttcttcaaaggaaaaccttcctctcttgatatcaggtctaaggtagtttgcccatctgagacggcagctctttccacatctttcgagacctgaacagttgaaataaaagcatcatcatatcagtctgaagcacaagtggtaagcagtgcagataggaggagggaggcaattttataccagcattcttagggagggtacgccagtttccagggccatgactctgaatataattagtaagcttaagatcttcctcgggagtccatggacctttcttgaggccagttttgtcacagcaaggtgctctccccattgatttttcttgaagaaatgatgaagcagatggtgcaatttacgtgaaggagcgagtggctggaggctatgctgcagtgatgaaaagatggagaaaagtgtga

SEQ ID NO: 173 - DNA, 1780 bp, Gossypium hirsutum
  source 1..1780: mol_type = genomic DNA
ttttttcttttgcatccaacttcaccttccttcttatctttcccgaaaaaggcaaattttaaggttgtcttaaagaagtgtatatctatatatatatacatatatttggaaatgggtaaacctccaggttgtgacaaaaatggattgaagaaaggtccatggactgcagaagaagatcagaaattgattgattatattcaaaaacatggccatggcagatggcgtaccctccccaaaaatgcaggtatatattccgattcagaacttgtatatacttaaaatcattgagtcaaatattcgagtttatcgattttctttgtagggttgaagagatgtggaaagagctgcaggcttcgctggactaattacttaaggcctgatatcaagagggggaagttttcaatcgaagaagatgaagttataatacaattacacagtgtgttaggaaacaagtaagttttttgcattaatagtatttggtctaattatgaattttacccttttctttagaaaaattaagaagtgagtccctccactactaaaccttaccgttaattcaaccaataacttggatttatattcatgagattaacaaaaatcatcactttagtaatttatacgcaataaattaattaaaatcagcaatttatgtgttaatcgaagaaccaaattctaatgtagatgattaacttttaagttttataaagtggcaggagaaaatttagaattatacgtatttcttaatttataattatagatattagtaaagtcaatgaaacatatgttgtcttatggtgttactatgtctgattcactactgttttttctttgaaacttaggtggtcagccattgctgctcgattgccaggaagaacagataacgagatcaaaaactattggaacactcatatcaagaagaaactattgagaatggggatcgatcctgtaactcatgctcctcgacttgatctgctcgaactctcttcacttctcagttcttctctttacaattcttccttaaatccagcaggttttgtcggatcaatgtttaaccctagtttcttcagcttagccactgctttcttatcatcaaaccaaaccaaaaacctggaaattaataaccttgcaggaaatatccaacaaatacagaacccttatgaaccttaccagggaaaccaggttcctgttataacccaggtttcacaagctgatttgaaccagttttctgcaaatcctggtctgccaaatttgtggcaaatagacaataatgttagtgattcaaagggtttttgccgaccaccatgcaaaacattaatggctacaaccatgggttttatttaggtgatcaaaacctgcaacaggtatgtacttttctgagaaaataccaaatttggtgccttttggatcacttttatccacaccatcttcaagctcaactcctttgaacaatggtagcagtactgaagatattgaaagggatagttattgcagcagcaacaacatgttgatctttgatgttcctaagggattaaatgtcaatggatgcatgtaatgtttttgaaataaaaagttcgattttgaagtgtttttaattgtggggattttgactagggttattgcatatttgtaacatctatgtggaatctttaattattattattttttagaagtttttgttgaattctttgcattgcttgattcctatttaaattttttctttctgattctattgggggttgaggttgaagttatgctgtttaaattgacatttgccaaaggg

SEQ ID NO: 174 - DNA, 1543 bp, Gossypium hirsutum
  source 1..1543: mol_type = genomic DNA
gcgtatgaaggccggcaccaaattccgttgaccttaatcttgttttccaactatatatgtatggtggtcatcgttgcttttttcatctaccatttccacttttcgccaccttcacttcttctccaagccatctcacaccttcacgtaaacttcaccatccttttttttttccaaggaaaatcaatggggagaacaccttgccgcgacaaaaatggcctcaagaaaggtccctggactcccgaggaagatcttaagcttattaattatattcagattcatggcgccggacactggcgtaaactccccaagaatgctggtatgtatatgtataaacttgttttcttttgtatttttaaatattgtgttcttcaggctgtgatgatgggttttgtttaaactgtttagggctccaaagatgtggaaagagctgccgtctccggtggacgaactacctgagacctgatataaagagaggaaggttttcatttgaagaagaagagactataattcaactacacagtgttttaggaaataagtaaggtttacactttacagtgttttatgatattgttatgagtgatgaagttggagtttacaaattcatttgtctgtaaatcaggtggtccgccattgcttgtcggttgccggggaggactgacaatgagatcaagaattactggaatacacatataaggaaaaggcttgcaaggaatggaatcgatcctgtaacacatgctcaacgtcttgatttggttgacttgtcttcttccattattagctcattattaggtgtccaagctctcctaaatcctcaactgttaagcttagctaacaccctcttgtcgttaaaacaagaaaacccagaattactactacaatatcttcaacaaaaccagcttcttcaaactcccacgttagaaccacgaagccaacttcttcaagctcccatgacagactgtagcaatcaaaattcccagaaaagctatgtattagtttcgcaaccaaattatgaacattctaacccaaatccaacggttccatcacttgtatctgacaattcacatttccattcaatggatggtagccagaattttgggttggattcagtgaggttcacgccgatatcaagtccaactccgttgcattcatcatctacattcatcaacggcagctacactacccattacgaaatagaaagattcaacagtttgctcaaatatgaaattccagaaagtttgaatattaatgaccttttgtaaatatatatacatacacacacattatttgtagcttagagtctcagagttttggcttgtaaaactgaagacaccatcattattggtttttttttagatattttattttgttttgttttttttttctcagttttttgtgggttactgggtttgtattatatatatatacacacatattataattatttgattgtattacttgtattttaaatataatttgttaattttcagcaatgcatgctcatgaagataagctaatatttaataatatttggagttatatttat

SEQ ID NO: 175 - DNA, 1666 bp, Gossypium hirsutum
  source 1..1666: mol_type = genomic DNA
attttcttctcacttctctctctctctcgctcgcaaggtcttaacccaaagctaaaccttatttctgtaacattataaccaaaagggcaaagctttttttgttgggaagctgtaacaggaagcatggggagatcaccttgttgtgataaaaatgggctcaaaaaagggccatggacgccggaagaagaccagaagttgattgattatattcaaaaacatgggtatggaaattggaggacgctgccgaagaatgccggtaactattatacctattgtattttcttgtcttagtttctggttttgatggatgaactatagtgctaattggtttatgttttctttttttatttgttaataacaataataggtcttcaaagatgtggaaagagttgccgtcttcgatggactaattacttgagacctgatatcaagagaggaagattttctttcgaagaagaagagactataattcagctacacagtatattgggcaataagtgagtttcttgttcattttcccttggctcttttttacttctataatcctttgttttcttacattgttttgaataatatttacaggtggtcggctattgctgctcggttgcctggaagaacagacaatgaaataaaaaactattggaacacacacattagaaagaggcttcttcgcatgggaatagatccggtgactcatagtcctcggctggacctactcgacctatcctccattctaagctcatctctttacaaccaatcccaaatgaacatttcaaggttactgtgtgtgaattccttggttaacccagagcttctaaggctggccacttctttcatgtcatctcaacgtgaaaaccaaaaccacgagttcatcgttgatcacaatgttgaagacaaccagctttgcagctcccaagtccaggaccagtatcaacaaccattaatgcagtccaaccataatcatctgccaacgcaagtccaagaaatcccagcttgtagtattcctttttccaatgaagcagagctcatgaatatggaccaattcccatcaaatttctcacacttaaatgactggcaaagcaatgcaatgccttcggatttgacggaggattacgtgccgctaccgccaaactatgactattacgccactgatcatcatcatcatcaaaccgtgaaggatccttcatcgtccgaaacctcaaatttccaatccaacaacagcaaccagagtttcagcttcgcgtcagttttatcaacgccttcctcaagtccaactcaattgaattccaactcaacatacgtcaacaatagcggcattgaagaagaaccagatagctactgcagcaacattttaaagtttgaaatcagagatgttttggatgttaatgatttcatgtaggtccgaaatcaaaactcacaaaaaggagtttccatttatgtgctttcttttttcttttttggactaagtgggatggggggtgtctatacttataaaattttctacaaatagtttattttgttttattttttaccctacggcaagatcctaccatttcctccttttctttttttcttttaaaaaaaagttatttcaatatcacggaaaggttccattattgatattgcaagttccacgccattttttttatttattatttttagattc

SEQ ID NO: 176 - DNA, 1340 bp, Gossypium hirsutum
  source 1..1340: mol_type = genomic DNA
gaaaagaaaagaaaaaggacagaacggatgtatgatcttgcttctaacacagtgatcttgagagaaatcaactattaattagtagaaattttcacacgtatcaacatgtctcactaatcaaaaaaaaaaagaaaaaagaaaaactctttttgggagttatgcatttggaattacatgaaatcattaacatccaaaatatcagggatttcaaacttcaaaatgttggtgcaatagctttccgtttcgtcttcagtggtgctgctactgttgaggtatgcggagtttgaattcaatggggcggggcttgacgaaggcgtcgacacaactgaccccaaccccaagctctggttgctgttgatgggatggaaattcgaggtttcgattgaagggtccattacggtttgataatccgagccgtaatagttgtactgcggcggtagcggcacgtaatcttcagtcaaaattgaaggcataacatagtcattgaaatttgatgggaattggtttacattgggttccatcacgagttgtagttcttcgttataaaatggaacactacaagtttgggtttcttcgacttgtgcgtggcaatggttagattgcgtcaatggttgatattggtcaacattatgaagaagctcagggttaacaaaagactggataagatattgattgtgaagggaagagagaccgagaagatccagtcgaggagtatgggtcaccggatcgatccccattcgaagaagaatttttctaatgtgtgtgttccaatagttttttatttcgttatctgttcgtccgggcaaccgagcagcaatggcagaccaccttaaaacattacaaaacattagagggaaaaaacacaataatagaactgaaaacagaaaataaagatgtaaacagaacttacttgttgcccaatatactatgtagctgaattatagtctcttcttcttcaaaagaaaaccttcctctcttgatatcaggcctcaagtagttagtccatcgaagacgacaactctttccacatctttgcaaccctataataaaagattttagaaacccatgaggcgtgaagtccataagaagtactataattcatccgtagagaaaacatatggtgtcctattggtaaatgaatgctagaggtttaccagcattctttggaagtgtcctccaatttccataaccatgtttttgaatataatcaatcaattttttatcttcttcaggagtccatggcccttttttgagcccatttttatcaccacaaagtgctcttcccatgtttattgcttagtgacagagaagaagagaaaaatgatgcagcagcaaggaga

SEQ ID NO: 177 - DNA, 1924 bp, Gossypium hirsutum
  source 1..1924: mol_type = genomic DNA
tatttatacaagtacgtccccttacggaccctacacatctctcttttgctgcgtttcattagcatatatacataccaccaccaccacccccctcaaaaaaaaaaaaaaaagcttcgttgaggaaactccaccatgggaagaacaccttgctgtgataaaaatggtctgaagaaaggtccatggacacctgaagaagatcagaaacttatcgattatattcaaacacatggttatggtaattggagaacattgcctaagaatgctggtaaagtacagaatctcttctttacctttatttccattgatgaatatgttatataatggtatgttataatggagtttttttttatattttttttgttgttgttgaataaaatagggttacaaaggtgtggaaagagttgtcgtcttcgttggactaattatttaagacctgacataaaacgaggcaggttttcatttgaagaagaagaagccataattcaactacacagtgtgttgggcaacaagtgagtttaatttcagttgtctcagttttcgtaaaattatcatggagaatcctatattaggagtaggattattttctcaaaattggtctttctgttaaaaaccgggatacacttggtataaaagaccaatttactctttaatctaacatgtaaggactaatttgctcattttttaagtagatgaggcaaaatgcaatctaactctcagtcgggggcaaatccaaaatttttttaagggggcggaattgaactataattttttgtgcggttaaaatgtaattttatcttgtattaatttatgatttcatcacctgtgaaaggattaaacataaatctttttattttttgaaagctaaagtgcaattttaccatatagtgacatttattaagggactaaaaaacaattttcccatttaccttgttgttttctatcatgtttttgattatatatgtgtaatgtataggtggtctgccatagctgcacggttgccgggaaggacagataatgaaataaagaactattggaacacacatattaggaagaggttgcttcgaatggggattgatccagtgacacacagtccacgattggatcttcttgatttgtcttcaatcttaggttgttgttctttttataaccagtctcaaatgaacatgtcgacgaggttgctcggcggcggcggcggtgttcaacccttggtgaaccctgagattctaaggttagccacgtctatcatgtcatcacctcaacgtgaaaaccaaaacccagatattcttttccatgaaaatcaataccagcaaccgccattaatgcaaaacacaaatgtagcagaaccggtgatgaacaacaaccctaatgtaataatagaccagttcccatttaatggctgtttcactgactggcaaaacaatgccaatgccgtactcccatatttgaccgaagataattacgttccggtaccgtcaaactgttacggcggcggaaacggagaaccgagcttcaggacgccgtcttcatcgagtccaacgccgttgaattcaaataattcaacgtacatcaacagtagcagcactgaagatgaaagctatagcagtgatatattgaagtttgaaatcccagattttttggatgttaatgaattcatgtaatttgcaaagagaaattaaaaaattaaaaaaaatcaaaatactcacaaatgaggttttgattttttggattcagtgaaggggttgttgttgttgatacgtgtaaaaccttctgctaattattaatttttttttgttgttgtgatttttctcaagcttactgtattaggaagtaaggtcctactttttttaatttagtcctttttattatattgaaaagtttcccattattgatatgtccctaccattatttaattattattttcgat

SEQ ID NO: 178 - DNA, 1556 bp, Gossypium hirsutum
  source 1..1556: mol_type = genomic DNA
gtgatatatataacttcatttgaatccagaaaacatctcactaagaatcgtattttaaggaacttaaacaaaaaaatttaagcagtacaaccaaaaggaactacaaaaaaataaacaagccaaaaacccaaaacactgaggatgaagattctttcagtatcacaagtccaacctctaatatattatttacataaaatcactgatatccaaactatcaggaatttcaaacttgagcaagctgctgaagctttctttcttgtcatcgacactgctgctgctgttgatgaatgtagacggtgaattcaacggagtaggacttgttattggcgttgacctcacagaatcaaagctaaacatctggctgccccctactgattggacgttggaattttcagatgtaaagggatctgtcggatttggactccagtgcacatagtttggaagcgaagcacaggtattagttaaagtagaagtcaatggttcttgggtatctgggcaactgaagcttgtcatattggaagaaatccctgttgcactgttttgcatgagttctatttggtttagcgccgaagtacaaggaactggagtagatgtggtgcatgtggaatcattttggatggtggattgaacttgaagctgacttggttgtaaggagctgggaacaagatgttgctgagaattagagagctggtttttgtggagatattgcacaagtatatctgggttctcttgtttcaaagataagagagtattagctagccgtagcagttgtgggtttaggagaggttgtgcacctaacaagtttgacgcattgagaagagattggttgcacagagttgaggtgagaatggaggaaaggtcaagcaaatcaaggcgtggagcatgcgtcactggatctattccatttcttagaagccttttcctgatatgcgtgttccagtagttcttaatttcattgtccgtccttcctggcaaccgagcggcaatagccgaccacctgatattcataacacaagctagagtgtgtaaggtccaagatcatcataatatgaaaatgactgcccaacaatataatattgaccacacactttatgttgtaatgaaaattttaaatggagaaaaagactctaaacatacttgttccccaagatactgtgaagttgaattatggtttcttcttcttcgaaggaaaaccttcctctcttgatgtcaggtctaaggtagtttgcccatctgagacggcaactctttccacatctttcgagccctgaacagttgaaataaaagcatcaccatatcagtctgaagcacaagtgataagcagtgcagataggaggagggaggcaattctataccagcattcttagggagggtacgccagtttccagggccatgaatctgaatataattagtaagcttaagatcttcctcgggagtccatggacctttcttgaggccagttttgtcacagcaaggtgttctccccattgatttttcttggagaaatgatgaagcagatggtgcaatttacgtgaaggagtgaatggctggaggct

SEQ ID NO: 179 - DNA, 1575 bp, Oryza sativa
  source 1..1575: mol_type = genomic DNA
tggtacaatcctgtacaaaaattgcctcttgtgatgatcatgttttgcccctttggtacatggcgtggagtgttcgattcggctctgtttccacgcaaggaagaatcttattacatgtagtcgctcacgtcgaggagctcggataggtgcatgttgatgagcagcccagcgtcgtcgacgtcaccgctcgcgttcaagccatacgtcgtcgtcgtcgtcgtagaggatgagttgatctgtccggcggctgctgggctcgacgacggcgtggacacgccggagttgacgttgtggttgttgctactcgagaccgtgctgctccactgctgcaggttggacgcgtcggacgccatctgcatcagcgccggcacgtagtcgagctggttgtcgtagctcgggtgctgcacggcgccgcggcggtggcaggtcgccgccgccatgtgatcctgcggttgctgcgccagctgctgcgtcgggctggcgtgaaccaggcctggcatttggtggcaggcggtgctggtggcctgcaagaactgttcggtcgccgcggcctgcggcggcggcggcggcggcggcgtcacctgctgttgctgctgcgccatctgcgcctgaagcagccacggcaggagaagctgcgcctgctcggcggcggcggcggcggctgcgccggtcgtcgtggcggcggggaggatggcggaggcgaggcggagcaggtccgggtagccggcgagcggctcgagcgcgcggagcgtgtcgaggtcggcctgcgtggggtagtacgcggcggcggcggcgggcttgaggagggaggtgagatcgaggaggtcgagacgcggcgcgtgggtcacggggtctatgcccatgcggaggaggcgcttgcggatgtgcgtgttccagtagttcttgatctcgttgtccgtccggcccggcagccgcgccgcgatcgctgaccacctaagccaaaaaaaaaaaaaaatcatgcacggaaaacgcaaccggcatcatcgatcatcagcaaccgtacgcccaagtgtccacgtactgaaacaataattattagccggataatttgataatcttacttgttgccgaggatgctgtggagctggatgatggcctcctcctcctcgaaggagaagcgaccacgcttgatgtccggcctaaggtagttcgtccaccgcagccggcagctcttcccgcacctcgagagccctgcacaaacaaagaagctggatatatcagttaccattcataagataagctaatctaagctagctttgtgcatgctcatcaatggcggcagagcaaagctgacgcgcgcgctcaccggcattcttggggagcgtgcgccagttgccctggccgtgctccttgatgtaggcgatgagcttctcgtcctcctcgggcgtccacggccccttcttcagcccgctcttctcgcagcacggcgcccgccccatcgatcacgggagcacacgtagttcgctagcaggcggtgcaagagcaaaaggttcggtttgtctcgcagccaagcaggcgttagccgtgtgaagagcggcgggagcaggagacgga

SEQ ID NO: 180 - DNA, 1870 bp, Lotus japonicus
  source 1..1870: mol_type = genomic DNA
tacaacatgagaaaacattcagatgaaagtacaaaagaataaaatacaaagagtacttgtattatcaacaatattattgacaacgggaaagcaaaaatgaatgataaaactaagaaacaacccaacaacaaatccccctgtagcctaaaataaacaataaaaaatgcaaactaactagcagtagtttacaaacgccatcacacaatccatacatagagacatatttacaagaagtcactaatgtctagactctcaggaatctcgaatttgaacatgtcgctgcaataagtgtccctctcttcctctgcgctgctattcgcaaagttggccggtgaatttagcgtcgtggttcctggggtagataaaggcgttgacagaactgagccatatcccatcatgttttgatacacagattccaggttctgttgcaaattatcaacttggtattgttgaggtaccaaaccgtcaccaaaatacgaagggttaatcgaatttgaattctccggagaacttgaactgctcatgttcatcgccatgttgttgctttgaatcggtgtttggagctggctcgttgtaaactctggtgggacaacttggttctgcacctgatgacaattcatgataccattgatttgttgtggattttgtgaaatcaagcctgtgttgtcattctttaaagataacaaagtggcagtagctgctagctttaacaattcagggttcaccaacgattgagcaccaaacaagccttgaaggttcagaaacgctgggttagttaatgctgttctgagaacattggacatgtcaagaagatccaggcgtggagcgtgagttacaggatcaattcccattcggagtagtctctttctgatgtgggtgttccagtagttcttgatttcattgtctgttcttcctggcaatcgagccgctatagcagaccacctaaatatgcacaaacaaccaagattataacataagccatttgaaaatttgtctactccaggccaagaaaaatttagttcacaaacttataagattgattaattttaacacataaagaaacatatcgtaaataacatgtgtattaaaaacatggtttatgagccaataaatttttaacatgatccgtcatagaatttatgattaagattatttcaacattaaactaaatttttatcacaattaatatgttatgttggatatgtaaattaacatggaccaaacgtgaatcatgtctaaaacttagcaatttcatgagtattttcttttgaaactaatttcatgagtatgatagtcgtcaattaatttatgaaaaaagttgagatattttaaggagatgaaagaataaacaaataagagacgtacttgttccctaagacactgtgtagctgaatgatggtctcttcttcttcaaaggaaaatcttcctcttctgatatcaggcctcaggtaatttgtccatcgaaggcgacagctcttgccacatctttgcagacctgtaatcaaccaacatataatataattagtgatgagtacataaaaatgtggagtaggaggttaagaaggatatatagagaagaagaattaaacttgtatttagtagaagaattaccagcattttttgggagatttcgccaatttccaggtccatgagtttgaatatagttgatgagcaagttatcttcttcaggtgtccatggaccttttttgagtccacttttgttgtcacaacaaggtgctcttcccatttcaaaaggaggtgtggatgagttccaaaaatgcagccgaaaagtgcactcaatcaaacacgaaagatagaaagctttgtgtctcaattctcaaaggcgaggaaagtaaacttttgttttgtt

SEQ ID NO: 181 - DNA, 2297 bp, Lotus japonicus
  source 1..2297: mol_type = genomic DNA
aaaaaagtcaaactatcaatagcattaaaggtttagaagaaaatgttacaagcatcaacatcatcgatgccaaattatgaaattaactagctacgatccaccataaatcgatgcaaggaaataatcaacccttttggaattgattcaattttctttggtttggtgatgatatgtaaagtgataacattacaagaactcactcacacataacatatcttggatttgaaatctcaatatgttgttgctgctgacaaagctttctgtctcatcttcagtgatactgctcccatttttataggtcgagtttgaattcaatggtgtgggacttgacgaaggtgttggtagaactgaagagaagctcatgttctggttgttgttgtttgcataacaatcagaattgtagtaattatagcatggtaattgagggacaaaatcctctgttttggtgcttgaaccaattccattgcaatgctgccaatcacttagctgagaatgttgttggaagcaaaagtcaggggaaatcgatgggtatgggttcaaattggactcaaccaatcgtgattgattgaaaggcattgaaacacaaggttggatttgttggttctgaatttgaggattgaaggattggttatgatgctcttgaccattattttggtcacaaatgttgaggtcttggttttgctgatgagaggaggagaagagtgatgatgccagctttagaatctcagggtacatgttcatttgtgatgagccatagagaggtgaacttaggatagaagagaggtccaaaagatcaagccttgggctatgtgtgacaggatcaattcccattttcaggagcctttttctaatgtgggtgttccagtaattcttgatttcattgtctgtccttcctggcaaacgagaagcaatggtagaccacctagaaatcaaataatagaatacagttattacactttcatatatgctgatggttaaatccggttactcgcatacgctcgacacccaggaacctgacactcgtctcaacccaaagagcccaaaaacaatggaggcaaccctgtgagaagatgacaaggtatggccacattgggtgccgattcttacatgtcaccatagacttcgtcattggcaaagctacgggtcttgttctattccggcggttgaatccgattaccaacatatcctcaacaccctggaacccaccacttgtccctcaacatgaggagcctcaaaacagtagagacaaccccttgtgtgagccttttagaaaggctcgagtgaggggttgactttgtcgtttaaggtttttccggagcgatgaggttatatttattattttggggctcctcatgttaagatgagtagcgggttctaaatgacgagaatattccggtaagtaatcggattcaacctccgcaacaatattattacattttaatgaataaaaacatcatttgactcatgctttgttatgtgtatatttaaattgaccaaagagaaaacaaaacaacttaattaattaaccaatagacttacttattgccaagaatgctatgaagatgaattattgtctcctcttcttcaaaagagaatagacctcgcttaatatctggtcggagataatttgtccaacggagacgacaactctttccacacctttgcaatcctgttcaatgaaaagtgagcaaagttcattccttcaactttagttgatcaagtacataaaaatgtttgatagagatcccaacattgtagaacatccaacaaacatttctagagcgagaaaggaattaaagagagataagtaattgatcgaatatatgatgattataagaagaaaagaaagatggagagaaaaattgaatgtctgaagagtgtgtgcactgattgtttggatttgtaagtaacatttcaatgtacaaatgacataccagcattctttgggagtattctccagttgccatagccatgtttctgaatgtaatcgatgagtttctggtcttcctcttgtgtccatggtcctttcttgaggccattcttgtcacaacatggtgctctccccatggcagtactagctcttgggtaagctactacttggtcaatgagtttgcttgaagtagatgacacaaaaagaggggacaagttttggacgtgaacaaattaatagagacagagagagaaattgagttatattgtgtaagaaactcaatgaggacgaacttgcttgttgtataaatagaacaaaaattaaggagattgcaaggataggaaacaggtgaagtcaaatggatttg

SEQ ID NO: 182 - DNA, 1874 bp, Lotus japonicus
  source 1..1874: mol_type = genomic DNA
aaattttcacttttcaaaaaaaaaatggaaaattttcaataatgcacatgtagaaaagcaaaattcattcttgagtctatataggggagacacgtatataggcatagtccaaaaatatgagaaaggacggcaccgaatccctttgacttcccatgtttccaaaccttcttcaccttcttcctatttatacctcaacccaagtaccatcccaccccattacggaccctacaatacatctctctcttcctttctatattctctcacgtctccaaattaagcttaattagctcaacaagctagagttcacttaatcttcagcttaaacatttccaaacacagcaagctagctatatggggagaacaccttgttgtgaaaagaatggcctcaagaaagggccatggacttccgaggagaaccagaaactcattgattacattcagaaacatggatatggcaactggagaacactcccaaagaatgctggtatgtatttatatatatatatgtctttcttttcacatcgaaattaatttattaattgtttaagctaatggggtgtggtcatttaattttgattgaatagggctgcaaagatgtggaaagagttgccgtctccggtggacaaactatctccggccagatataaagcgaggtcggttcacatttgaagaggaggagacaataattcagcttcatagcattcttggcaacaagtaagtcatggacaattctttggtggatccatcttaacatagtttttactactaattaatatttgattttaactgtatgttaaaattaatttgcacaaaagacattagacaatttaatatgcgaacaaatttgtttgttgattcatagtagacaaagacactgtaattgatcatttattattgatttatgagctaacgaagctacttgttgttgaattttgtaggtggtctgcaattgcatctcggttaccaggaagaacagacaatgaaatcaagaactattggaacactcacattagaaagaggcttctgaagatgggtattgatcctgtgacacacgctccacgccttgatctattagacctctcttcgatcctctattcatctctctctggttcatcacaaatcaaccttcagaggctcctttccatgcagatgaatccagagcttctaaatttggcttcctcactcaacatgacgagtgttgttggtcaaaatggtcaacacaacaacaacaacaaccagttctacaacccccaaatccagagccaaattctacattttgatcaagaccctgttcaagattgtaacacattcagcaccagttgtgtttcattgccacaattggactcatatccatcaaatttcaccgactttggctaccaacaaaattctcagcaaagtgataattgggacagtaatgaaattgcttatgtccctcaattaccgagctatgatcattattatggttctgataatcaaaatttcatgtgtcctccattgtcagaagcttcaacgtttcattccaataacagcaatcagaacttcagctttgcttcagttctgtcgacgccatcgtctagtcccacaccgttaaattcaaactccacgtatgtcaacgggagcaacacagaggatgaaagagaaagctatgatagtagtcacatgttgaaatttgaaatcccagacattttagatgtcaatgagttcatgtaatttatgatcatctgtaatcaacgattaaatcaaccaaaacgttgattaatttccccattggtttttttgggagagctagataagttacagttcttggaccatatggtgttgatatttgtaacatttcatgcatttttaatgtcattgattgatagcttaaattt

SEQ ID NO: 183 - DNA, 1049 bp, Raphanus sativus
  source 1..1049: mol_type = genomic DNA
tacgacctttgtttctctctttctcataattccatttaaactttcagattagctcgttattgataaaagcagattgaccaacttcttgtgattaatcattaatcatcaaaaacgtcgaatggcacgatcaccttgttgcgagaagaacggactcaagaaagggccatggacttcagaggaagaccagaagctaattgagtatatccagaaacatggatatggtaactggagaaccttccctaaaaaagctggtatgtttcttaattttcaatttaaatcatgtttttagtaaaaatattctccatttgtaataaattaataattttgtgtcgtcttctaattatcaggtttgcatagatgtggaaaaagttgtcgattaaggtggactaactatctccgaccagatataaaacgaggaagattctccttcgaagaagaagaaacaattattaaacttcatagttttttaggaaacaagtgagtttaacttttttttctttttttttaccaaagaaaactttctttttgtcggacagtatttactttgaactaatcaagattcttatgtttattctttttatagatggtctgcaattgcggcgcgtttgcctggaagaactgataacgagatcaaaaacttttggaacacacatacaagaaagaagttactaagaatggggatcgatccagtgactcacagtcttcgacttaatctcctcgacatctcaaccatcttagcatcatctcaatacaattcctcttcgcatcacgtgaacatgtcaacactcatgatggattctcatcgtcagcagcaacaatatccattggttaaccccgaaatactcaagctcgctacttctctcttctcccaaaaccaaaaccaaaatcaagtggtggatcatgacccaagcacccacgtaaaccatgttgataagcttgaataacttagcgaccaagttatagaagtccttagtgattaggaagttgtttaacttacctttgtgtgtttggtttaggatttctattaactataaatattgatatgtcga

SEQ ID NO: 184 - DNA, 1449 bp, Raphanus sativus
  source 1..1449: mol_type = genomic DNA
tttaaagttctaacattattaatttatagaagttctacagtatatcaaactagtacaaaataatgagacgtaagaaacaagaaataagaaacatatcttacatatgtaacgaaatctatatacgaaatacaatcgtattatctaaacccattaacatcaaacgaataatccggacacgtttcagaagtactcatgaagttattattgctataactctctttttcatcctcggtgatgcaagggctactattgatataagttgtggaacttgagtctaatggagttgggctcgaagagggtgtgggcaagaccgaagcaaagtccgagtaaaaaggttccaaagcaaagttagatgtcgaataatcatctggctggttcaatgggaacaaaggcattgaatcttggactgtagtcattggcatgaggtcctggaactctgtgaattgatacgttctacggaagcaagattgtaattcttgattaccaatcatactgtaaccggtttggtcttggtttacttcggttttgctaaccgtgttatactcgtgtgtggtgaagttgttctggttttggtgatgttgttgagaatttgaaaagagagacgttgcgattttgagtatctcggggttaactaatggctgatgatgattccatcacccatcatgagcctcaacatgttttcttgatgatgatgagaagagttgtagacagacgagctgagaatggaggtgatatccagaagatcaagacgtggactatgtgctaccggatcgattcccaactttagaagtctttttctcatgtgagtgttccaatagtttttgatctcgttgtttgttcttcctggcaatctagcggcaattgcagatcacctaaatagttttatcaagaaagcaaacaaagtcagaaaaacataaaaaaattaatgtaatcaagcacttgaaaatatgtcaagaaaagggaaacattaaactaacgtgtttcccatgatgctgtgaagttgaataatggtttcttcttcttcttcaaaagagaaccttcctcgttttatatcgggtcggagataattagtccaccggagccgacaactcttactacatctctctaaccctatagttaacaagatttgaagaaaaaaagatttaaaaaattatcaaacaaaaattgaatagaagtatttaagtaaaatgcaatgaggaagatatatacgaaccagcattcttggaaagagttctccagtttccataaccatgtttattgatataatcgatgagcttttgaacttactctggagtccatggacctttcttgagcctaatttttttctccaaacatggtgatcttcccatcgttttgaatattaatgattattaagtgaagaaaattgtataaataaatgttgttggattaatcaagaaattaagacctgagagtagagagagacgtagg

SEQ ID NO: 185 - DNA, 1512 bp, Raphanus sativus
  source 1..1512: mol_type = genomic DNA
cctacggccttttgtttctctcttctccattactttccttaaaactctctcattagctcattattgataaaaaaccattgaccaattctttgtgattaattattaaccatcgacaaaactcaaatgggaagatcaccttgctgcgagaagactggcctcaagaaagggccatggacgtctgaggaagacaagaagcttgttgactatatccagcaacatggatatggtaactggagaactctcccccaaaatgctggttagtctcttatttagcatttaaaccatgcttttagtaatgacgttttctgaacttttcaatttaaaatttgtatattttcccttaattatcaggtttgcagagatgtggcaagagttgtcggttaagatggactaattatctccgaccagatataaaacggggaagattctccttggaagaagaagaaactattattcatcttcatagctttctaggaaacaagtgagcataattctacttttgttgtttacaaaaaaaaataattctacttttgtctacacgacattttcttaataatgaattagtccaaagattcttatgtgtttcgctttaataaccttttatagatggtccgctattgcggcgcgtttgcctggaagaaccgataacgagatcaaaaacttttggaacacacatattagaaaaaagttgcttagaatgggaatcgatccagtgactcacagtccacgacttgatctcctcgacatctcatccatattggcatcatcactatgcaactcctcttcacatcatgtgaacatgtcaagactcatgatggatactcatcgtcagcaacaacaacattcgttagttaaccccgagatactcaaactcgctacctctctattttctcaaaaccaaacccaaaatcacaaccaaaaccaaaacttcgtggtggatcatgacacaaataaccaagagcaccattcggtttatcaccaagatgttaacgaagctggagtaaatcagtaccaaaccgaccatcaagattaccaatcttgcatgccgccattccccaatgaagctcagttcaacgacatgggtcatcagttcaatattttcggagaacaaaatctcgcttcaacctcgaatacatcagttcaagattgcaatattccatcgttcaacgactatgcaaactctggttttgtattagatccttcttactcggacaagagctttagcttcgctaattcggtcttgaacacaccatcctcaagcccgactacattacactccagttctacgacttacatcaacagtagcagttacaacactgaggatgaaatagaaagctattgcagtaatctcatgaagttcgatattcccgatttcttggatgtcaatgattttctcatataattttaagagcaagataaaaatccattgggataggttgttttacctgttgtaattgtaagacttgttttctaatggatctattacatgtaaaatacaatttgttcttgtta

SEQ ID NO: 186 - DNA, 1408 bp, Raphanus sativus
  source 1..1408: mol_type = genomic DNA
gcacccacggattgacatttataaaacataagaaactcctttaggctcttcgacccttttataagagagcgaaactattattctctaacgtccatcggtgtatacatccttttctgagttaccaactaaagatgggaagattaccttgctgtgacaagaatggagtgaagaaaggtccatggactcctgaggaggatcagaaactcatcgactatatacgagttcatggtcccagcaactggcgcattctccctaaaaatgctggtaagtatatatacacatctcttgatagattatggtctctataaactgaattgcacacttataaatcgtattttacaaactaaaggactccaaagatgtggaaaaagctgccgtcttcgatggactaattatctaagaccggacatcaagaggggaagattctccttcgaggaagaagaaactatcattcagctacacagtgttatgggaaacaagtaagtctcatacaaatcatattcgatccattagttacaattttttgtacgtttaattttaagcgagagtatacatacgcatgcggaccgtatatttcaacatttaggccatcaacttcactaaactattattattcataagtattgacctatatatactttaatatagtattgatgagttatatattatttattgaccactaattgaattgaatgatggattataggtggtccgcaatagcagctcgtctaccaggaaggactgacaacgaaattaaaaaccattggaacactcacatccgcaagcggcttgtaaggagtggcatcgaccctgtaactcactccccgcgtcttgatcttcttgatttgtcctcacttctagccgcgattttaaaccaaccaaacttttcatcagtagcaacacatgcatcgtctctgcttaatcctgatgtattgaggttggcttctcttctcttgccccctcaacagccacttccaaaccctaatacactttacgcatcgaacctcgaccaaaatcttcaaactccaaacacatcagtatcgtctcaagacactcaaccacaagccgagtgtacaactccaacaatggacgaaacttcatattttgagcctgtgaacgcaagactcgaggtcggtccttcggatgtattaccacctctgtcagagagtttggacttagactcactcatgtcaacgccaaattattctccacaacaaaataacattgaagcagaagccaactccagcagtttattcgactttgggtttccggataatattacctttgatgactttatggggttactttaattatcaacatatgcatatctctacacatatctcccacctatgattcatgttttgttgcattctttttatggtttaatgtataaacttatgttttccgt

SEQ ID NO: 187 - DNA, 1535 bp, Raphanus sativus
  source 1..1535: mol_type = genomic DNA
tatatgtttagctatttattgtagtcatctgcgtatatggagaaaattcaagataactcgccctattcgttacacattcctgaaaaaagtgtatagaaaaatatatctatctttgacggaaaacaataagtttatacattaaaccataaaaagaatgcaacaaaacatgaatcataggtgggagatatgtgtagagatatgcatatgttgataattaaagtagccccataaagccatcaaaggtaagattatccggaaacccaaagtcgaataaactactggagtagttggcttctgcttcaatgttattttgctgtggagaataatttggcgttgacatgagagagtctaagtccaaactctctgacagaggtggtaatacatctgaaggaccgacttcgagtcttgcgttcacaggctcaaaatatgaagtttcgtcctttgttggagttgtacactcggcttgtggttgagtgtcttgagacgatactggtgtgtttggagtttgaagattttggtcgaggttcgatgcgtaaagtgtattagggtttggaagtggttgttgagggggcaagagaagagaagccaacctcaatacatcaggattaagcagagacgatgcatgtgatgctactgatgaaaagtttggttggtttaaaatcgcagctagaagtgaggacaaatcaagaagatcaagacgcggggagtgagttacagggtcgatgccactccttacaagccgcttgcggatgtgagtgttccaatggtttttaatttcgttgtcagtccttcctggtagacgagctgctattgcggaccacctataatccatcattcaattcaattagtggtcaataaataatatataactcatcaatactattaaagtatatataggtcaatacgtatgaataataatagtttagtggagttgatggcctaaatgttgaaatatacggtccgcatgcgtatgtatctctcgctctttttcataatattaaacgtacaaaaaattgtagctaatggatcgaatatgatgtgtatgagacttacttgtttcccataacactgtgtagctgaatgatagtttcttcttcctcgaaggagaatcttcctctcttgatgtccggtcttagataattagtccatcgaagacgacagctttttccacacctttggagtcctttagtttgtacaatacgatttataagtgtgtaattcaatttacatagaccataatctatcaaaagatgtggatatatacttaccagcatttttagggagaatgcgccagttgccgggaccatgaactcgtatatagtcaatgagtttctgatcctcctcaggagtccatggacctttcttcacaccattcttgtcacagcaaggtaatcttcccatgtctagttggtaactcagaaaaggatgtatacaccgatggacgttagagaataatagtttcgttctcttataaaagggtcaaagagcctaaaggagtttttatgttttataaatgtcaatccgtgggtgcactc

SEQ ID NO: 188 - DNA, 1632 bp, Raphanus sativus
  source 1..1632: mol_type = genomic DNA
actccttttggctcttcgatcgttcaataagagaaccaaactattagtgaaccctagcgtcgatcggtgtacatatatacccttttcaaaattaccaaataaagatgggaagatcaccgtgttgtgacaagaatggagtgaagaagggaccatggacgtctgaggaggatcagaaactcatcgattatattcgattttatggtcctggcaattggcgtaccctccctaaaaatgccggtaagtatacatgaacttaatcaaaagatttattatgtatacttttctcctaataggttatgttccatctataaccaaacacttataattcgtactgttcatcttaaaggactccaacggtgtggaaaaagctgtcgtcttcgttggaccaattatctaagaccggacatcaagagaggaagattttccttcgaggaagaagaaactatcattcagctacacagtgttatgggaaacaagtaagcctcatttacatcataacttagtttttgacgggatgaggtagctctactggttagagcttcgggggccaattgtcatgctcccgggttcgatgccagccggaggtgaactgtctcttccatgtcactattagtggtactgggcctcggcctaggttaataccctcccggatgaagttgaccgctgcctgaccgggtccagggaatgacccgctaagcggggaaccctggattatcaaaaaaaaaaaaacttagtttttgagattcattagttgcaaatttgatggtttaattaatgaaaaaagcgatggtgtacgtatgcatatgcatgcggacagtacatttcaatagttaggccatcaactctactaaaatattatcatatgcattgacctatcatttaatataacataaactatgtattaatcatgcatcactaattctttttatggtttataggtggtccgcaatagcagctcgtttaccgggaaggaccgataatgaaataaaaaaccattggaatactcacatccgcaagcgacttgtaaggagtggcatcgaccctgttactcactccccacgctttgatcttctttatatttcctcacttttagccgtacttatcaatcaacccaacttttcatcagttgcaacacatgcatcgtctctgcttcatcctgatgtattgaggctggcttctcttctcttaccccctcaacaaccactccaaaactttaatccaattcacgaaccgaacctcgaccagaatattcaaactccaatcacatcggtatcgtctcaagactctcagccacaagccgaatgtacaactccatcaaacaacgaagctacatatttcgatcctgtgaacgcaagagtagagggtcatgcagatctattgccacctttgtcagagagttttgacttagagtcacttatgtcaacgccacaacaaaatagtattgaggcaggagccaactccagcagtttcttcgactttgggtttcccgataattttacatttgaggactttatgttaaattaattatcggtgtatgcatatctctatacacatgtatcccttttttccatctacgattcttggtctgttgcattttttttatggtttaatgtataaacttattcttttctg

SEQ ID NO: 189 - DNA, 1502 bp, Raphanus sativus
  source 1..1502: mol_type = genomic DNA
acgacctttgtttctctctttctcataattccatttaaactttcagattagctcgttattgataaaagcagattgaccaacttcttgtgattaatcattaatcatcaaaaacgtcgaatggcacgatcaccttgttgcgagaagaacggactcaagaaagggccatggacttcagaggaagaccagaagctaattgagtatatccagaaacatggatatggtaactggagaaccttccctaaaaaagctggtatgtttcttaattttcaatttaaatcatgtttttagtaaaaatattctccatttgtaataaattaataattttgtgtcgtcttctaattatcaggtttgcatagatgtggaaaaagttgtcgattaaggtggactaactatctccgaccagatataaaacgaggaagattctccttcgaagaagaagaaacaattattaaacttcatagttttttaggaaacaagtgagtttaactttttttttctttttttttaccaaagaaaactttctttttgtcggacagtatttactttgaactaatcaagattcttatgtttattctttttatagatggtctgcaattgcggcgcgtttgcctggaagaactgataacgagatcaaaaacttttggaacacacatacaagaaagaagttactaagaatggggatcgatccagtgactcacagtcttcgacttaatctcctcgacatctcaaccatcttagcatcatctcaatacaattcctcttcgcatcacgtgaacatgtcaacactcatgatggattctcatcgtcagcagcaacaatatccattggttaaccccgaaatactcaagctcgctacttctctcttctcccaaaaccaaaaccaaaatcaagtggtggatcatgacccaagcacccacgtaaaccaaacaggagtaaaccaataccaaatcaaccatcaagaactccagtcttacttgccgccattccccaatgaagctcagtttaatgacatggaccaacagttcaatggtttcggagaacatactctcgtttcgaatacgtcggtccaagattgcaatattccaacgtttaacgtttatgaaagctctggttttgtgctagatcctttttattcagatcagactttcaacttcgctacctcagtcttgaatacaccatcctcgagccccactatgttaaactcatgctccacaacttacatcaacagtagtagtgacaatattgaagatgaaaaggaacaccattgcaataatcttatgaagtttgatatttccgacttcttggacgttaatggtgttatcatataaattcaagaaataaaaatcattgttggatagtctttgttttactttttgtaaaattaagatttgttttatgtctatttgcatttgtttttacatgtaaaataccattcgttttcttgttgtacttatgttttagaggttatttactactattttcaataatggagtttccattat

SEQ ID NO: 190 - DNA, 1383 bp, Raphanus sativus
  source 1..1383: mol_type = genomic DNA
atcctaatggatattttatttgaaattatataataaaatcattaacgtccaaaaaatcggaaatgtcaaatttcatgagattactacaatagctttccatttcatcttcggtgctacaactactactgttgatgtaagtcgtgacgctggagttcaacgtcgggtttgaggatggcgtgttcatgaccgaataagcgatgttgaagttgtgatctaaatacgaatggtcgactacaaaactagagcttgcatagtcgttcaacgactgagtattgcaatcttggacagacatattcgagtttgaagcaaacatatgttctccattatgatctgtatcgttaaagtgagcttcgtcggggaatggtggcaagcaatactggatttcatgatggttggtctggtattgatttactccggtttggttatcatcatgattaaccgtgtagttctcgtgggttttggaatcatgattcaccaaaaagttttggttacgattttggttgtggttatggttgtggttgtggtcttggtcttgggaaaagagagagttagcgaacttgagtatttcggggttaaccaatggattatgttgctgctgatgatgagcatccatcataactcttgacatgttcacatgatgtgaagatgaattgtatagagatgatgctaagatggacgagatgtcaagaagatcgagtcgcggattgtgagtcgttggatcgatccccattctaagtagcttctttcttatatgtgtattccagaagttcttgatctcgttatctgttcttccaggcaaacgcgccgcaatagcagaccacctatgaaaaaagtaaacacataagaatcttgaactagttaaaagaaaatacatattgtcaggacaaaaacaaaactatactcacttgtttcctaaaaagctatgaagctgaataattgcctcttcttcttcaaaagagaatcttcctcgctttatatctggtcggagataattagtccaccttaaccgacaactcttgccacatctttgtaaacctgatatttaagagagaacaaaatttaattactaaatttttagaaaacatcatctttactcaaaacatgatttaaaatgtaaattaagagacgtaccggcatttttaggaagtgttcgccagttaccatatccatgtttctggatatagtcaaggagcttctggtcttcctcggacgtccacggccctttcttgagcccgttcttctcgcaacaaggtgatcttcccatatgattttgtcttgaatcttgatgattaattattaaatcacaaaattggtcaacaggctttgacaataatgagctaatcagagatgatttaaggaaatagagaagagagaaacaaaggt

SEQ ID NO: 191 - DNA, 1468 bp, Raphanus sativus
  source 1..1468: mol_type = genomic DNA
gcaaaatttaatgatttcttaatccgtgtgcacaactctaaaatgacacttattcagaaacaaagggagtagtatcttacatacagtatgtaataaaatctattatattgaatacaatagtattatttaaataactatatcccaatggtcttttgtttcttggaattgcagaaaaccattaacatcaaacgaatattcaggacacatttcagaagcactaatgaaattattgcaatgactctctttttcatcctcagtgctgcaagtgctactattgatgtaagttgtagaacttgagtctagtgaagtcgggctcgaagagggtgtggtcaacaccgaagcaaagtccgagtaaaaaggttccagagaaaagttagatgtcgaataaacatcttcctggttcaatgggaacaaaggcattaaatcttggactgtagtcactggcatgaggtcttggaactctgtgaattgatccatgctagggaagcaagattgtaatacttgattaccaatcatattgtaaccggtttggtcttggtttacttcggttttgttaaccgtgttaaactcgtatgtggtggagttgttctggttttggtggcgatgttgagaatttgaaaacagagacgttgcgagtttgagtatctcggggttaactaatggctgatgatgattcccatcacccatcatgagcctcaacatgttttcttgatgatgatgagaagagctgtagacagatgagttgagaatggaggtgatatcaagaagatcaagacgtggactatgtgttaccggatcgattcccagctttagaagtctttttctgatgtgagtgttccaatagtttttgatttcgttgtctgttcttcctggcaatctagccgcaattgcagaccaccttatagtttatcaagaaagcaagaagtcagaaaaacatagaaaattaatgtatccacttgaaaatatgtcaagagaagggaaacattaaactcacttgtttcccatgatgctgtgaagttgaataatggtttcttcttcttcaaaggagaaccttcctcgttttatatctggtcggagataattagtccaccggagccgacaacttttaccacatctctctaaccctatagttaacaagattcaagagaaaaaggttaaaaaaattatcaaacaaaaaatgaatagaagtattaagtaaaatgcaacaacaaagatatatacgaaccagcattcttgggaagagttctccagtttccataaccatgtttcttaatataatcaatgagcttttgatcttcctctggagtccatggacctttcttgagcccgatttttttctccaaacatggtgatcttcccatcgtaagattaatgattactaaatggagtctaattattaaaactagtgttgttggattaatcaagaaattgagactttggagtatggagaaagagagagagacgtagg

SEQ ID NO: 192 - DNA, 2276 bp, Setaria italica
  source 1..2276: mol_type = genomic DNA
ttacttgacttgtcacaaaacccaacaggagtccaacatatatagtttatattttgtcagcagttgatcgatgcaattgtacgccgctcatcagagggagcaggcaagcatccgcaatcattaagttacgttgcacaccacaccagtgctagctagtgatctgtttttctcaaccattttaaagaattattgcctatatcatgtgactatgacagttactggtgtccttattcaagcttatttccccgtccttttttgatgattttctctcctttttttatattcgcgccacacagggcccccaatcacacagtgacacaaggaaccaaagaaagcaagggtgaataaactagtagcattctaagaaaagcaaccctaatttttcttcgctggggacaaggcggtgatgcgagcgagagcgacagcggccgcctccaccaatcatgcgaggacaccttcgccgtggttccccacactgacacgcaccacacgtccaattgaaacgacgagaattacagtgagccgagagaaagaaattcaagggaactgaagcttctaactgtaaccacatgaacgaactggcacaaaggaggtgcaacaataatcctgtacaaaaatgcgtccctgatgatgacatagatttcgatgcgttcgctccttgcggtggtacgagatgaagtgttggacttggacctagcttccacggatcgtcgggtcccgtgggattttctgggtgtgttacatgtagtcgctcacatcgaggagctccgacagctgcatgctgaacagcgcggcggcgtcgctgctggcgctcgcgccgccgccgtacgtcgtggcggtggaggcggcggagtgattcaacccggccgccacggggctggacgacggtgtggacacgccggagccgacgttgttgttgttgctgctcgtcaccgtgctgctccactgctgcaggttcgacgcgtcgggctggaccatttgcatcagcgccgggacgtccaggccgtccacgtagccggacggtggcgcctgcatgctattgcaggcggccgcggccatgtcctggtgctgttgctgttgcgcggcggccgccagctgctgctgctgcaccatcgggttcgcgtggaccaggtccggcatttggcacgcggctccggcctgctgctgctgctgcgacatgaactgatggtcggcctgctgcggcagcgccatggcggccgcctgcgccatctgcgcctgcagcagccacggcagaagctgctgctggtcgccgatcgcggcgggcgcggccgccgagcccgacgagagcagggtggaggcgaggcggaggaggtccgggtagctggcgagcggctcgaaggcgcggagcgcgtcgaggtcggcctgcgtggggtagtatgcggcgggcttgaggagcgcggagaggtcgaggaggtcgaggcgcggggcgtgggtgacggggtcgatgcccatgcggagcaggcgcttgcggatgtgcgtgttccagtagttcttgatctcgttgtccgtccgcccgggcagccgcgccgcgatcgctgaccacctgaccagcagccaatcatgcacccatccatcagaaaccgtactagtacgcctacctactactactgctagtacgtagtagtagagcagaaacagcgaagctatgccagctagtagctgtcgatgcgaggaggaaaaaaaatcacttgattgtgatgcttacttgttgccgaggatgctgtggagctggatgatggtctcctcctcctcgaaggagaagcggccgcgcttgatgtccggcctcaggtagttggtccaccgcagccggcagctcttcccgcaccgcgcgagccctgccacgacaaggatcaaccaagcgaggtgagcatatatacaaaattaaaccgagtccggccagcatgtacggcgatcggtcggggcgctcaccagcattcttggggagggtgcgccagttgccctggccgtgcttcttgatgtaggcgacgagcttctcgtcctcctccggcgtccacggccccttcttcagcccgctcttctcgcagcacggcgcgcgccccatggatcgatcgaccggccgctacctcgggaggacgacgacgacgcagctcgtgtggaagggcgggggagcgagggaaaaggcccggtttgtctcgcagctagctgtagccgcgcgcagcagatggaggagagcgagaacaggacggacaggccgggagagcgtcgtccagctacaggggtgtgaaatgaaactg

SEQ ID NO: 193 - DNA, 2413 bp, Sorghum bicolor
  source 1..2413: mol_type = genomic DNA
actcatcagagagggagcaggcagcagctatagcaatcattaagctgcttgcgttgcacaccatataccagtgttagctactagtgatctgtttttttctcaaccatttaagaatcattgtctatatcatgcatcatgcgtccatcagctgtgaccatgacagttactggtggtattttaattattttatattcccgccatacagtccccaatcacataaggggaaatcaggagacgaggcatgggtgagtaaggcagtagcattctaagaaaagcaaccctgattttcttcgctggagacaaagccgtgatgcgagcgagagtgacagcagccgtctgaaccaatcatgccaggacaccttcgaattcgccgtacgtggttccccacactgacacgcaccacaagtctagctaattgaaagaaagaatagacgaaaattacagtagtagaaattctgggaagcttctaaacagtaattaatcactgatcgatcatgaacgaacaactggataaaggaggtgcaacaacaaatcctgtacaaaaatgcgtccgtgtccgtcctgagatagattttcgttttgccgcccgttgcggtacgtgatgaagtgttggacctagtttccacggatcagcaggtccccgtgctcctgtgaatttttttggccgtcgttgttacatgtagtcgctcacgtcaaggagctcagacagctgcatgttgaacagcgcggcggcggcggcggcgtcgttgctcgtgctcgcgctcgcgccgccgtacgtcgtggtggtggtggaggtggagtgattcaaccgcgccaccgggctggacgacggtgtggacacgccggagccgacgttgttgttgttgttgttgttgttgttgctgctgcttgtcaccgtgctgctccactgctgcaggttcgacgcgtcggcggcctgcaccatctgcatcagcgccgggacgtccaggctgtcgacctcgtagcccgtattattaggtggctgcatgctgtggcaagccgccgcggccatgtcctgatgcgcggccgcgagctgctgctgcaccgtcgtcgggttcgagttcatgtggaccaggtccggcatttggcacgcggctccggcctgcatgaactgctcggcctgctgctgcggcggcggcgccacctgttgcgccatggcagccgccgcctgctgcgccatctgcgcctgcagaatccacggcaggagctggccgttctggtggtggtcgccgatcgcgggcgggccggaggagagcagggtggaggcgaggcggaggaggtccgggtagttggcgagcggctccaaggcgcggagcgtgtcgaggtcggcctgcgtggggtagtaggcggcggcggcgggcttgaggagcgcggagaggtcgaggaggtcgaggcgcggcgcgtgggtgacggggtcgatgcccatgcggagcaggcgcttgcggatgtgcgtgttccagtagttcttgatctcgttgtccgtccgtccgggcagccgcgccgcgatcgctgaccacctaaccatcattagtgtagccaatcacgtatcagaaaccgtactactgtgcctatctactactcctaatcctactagctagtgagctacacaagccaagctaggctaggccagctagctactagtagttctatgcgagaggagaaaaagaaacactattattctgtttgtctactgtgtgtgcctgcttacttgttgccgaggatgctgtggagctggatgatagtctcctcctcctcgaaggagaagcggccgcgcttgatgtccggcctcaggtagttagtccaccgcagccggcagctcttcccacaccgcgcgagccctgcgtgtgccagccatggcaaggatcgatgtatcgatccggggtgagcatagatatgcatggatatgtctatgcgtatgattgatgagataatatataagctccggccgtcgaggtcagggcgctcaccggcattcttggggagggtgcgccagttgccctggccgtgcttcttgatgtaggcgatgagcttctcgtcctcctcgggcgtccacggccccttcttcatcccgctcttctcgcagcacggcgcgcgccccatcgattgttgcctggacctggatcaaccggtcgaccagcagaggtagcagacgaagctgcaggaagggcttgggacgacgacgacggagcccgtgctcgcgcccgtggggaaaggactagtgtcgagcgaaaaaaaaaggcctggtttgtctcgctgctacacgagcttatcggcgctgtagccgcagatcagaccgatcgagcaggacacaggcctggaggcgggagcgtcgttgcgttgcgttgcgctcgagctacagggagggggtgtgtgaaactgagctagaaaggaagag

SEQ ID NO: 194 - DNA, 1249 bp, Thlaspi arvense
  source 1..1249: mol_type = genomic DNA
atgggaagatcaccatgttgcgagaagaagaatgggctcaagaaaggtccatggactcctgaagaagatcaaaagctcattgattatatcaacaaaaatggttatggaaattggagaactcttcccaagaatgctggttcgtgtataccttcatttttgaacttctaatcatactttttattcattgcttctttattaattaacgatgttcttgaatctttacttatagggttacaaagatgtggtaagagttgtcggctccggtggacaaattatctccgaccagatataaaacgaggaagattctctttcgaagaagaagaaaccattattcaacttcacagcatcatgggaaacaagtgagtttggtttttccattttccgacatgtttttttttatgcattaacttactataaatcttgtagatcctgactttgtttgctttcttgataaactatgtgtaggtggtctgcaattgcggctagattgccaggacgaacagacaacgagatcaaaaactattggaacactcacatcagaaaaagacttctaaagatgggaatcgatccggtaacacatagtccacgtcttgatcttctcgatatctcctccattctcagctcatctctctacagcagctcttcacatcatcatcttcaacaacatatgaacatgtcgaggctcatgatgggtgatggtcatcatcagcaattagttaacccggagatactcaaactcgcgacctctctcttttcaacctctcagcaacatcatcagaaccagaaccataccacacaagagaaccaaaccgatataaaccaataccaaagtggttacaacatgattggtaaccaagaattacaatcttgcttccctaacatggatcagttcgctgagttccaaggcttcgtgccaacgaagacagtccaagattcaatgccttcgtacccatcataccacgacgatgattattcgaaatctaactttgtgttggaaccttattactccgactttgcttcggtcttgaccacaccttcgtcgagtccgactccactaaactcaaattctacaagttacatcaatagtagcacttgcagcaccgaggatgaaaaagattattgcagtaataacttaatgagtacttctgaaattcctgattattcgtttgatgttaatggttttctgcaattccaagaaacaaaaaaaccattgggacagagttatttaacaaaatattgtattcgttaa

SEQ ID NO: 195 - DNA, 1221 bp, Thlaspi arvense
  source 1..1221: mol_type = genomic DNA
ttatataataaaaccattaacgtccaagaaatcgggaatatcaaacttcatgagattgctgcaatagctttccatctcatcttcagtgctgcaactgctactattgatgtaagtagtcgggcttgaggatggcgtgttcaagaccgaattagcgaagttgaagctctggtctgaataagaaggatctaataccaaacttgagcttgcataatcgttgaacgatggaacactgcaatcttggaccgacgtgttcgaggttgaagcgagggtttgttctccaaaaccattgaattgacgatccatgtcgttaaattgagcttcattggggaatggcggcatgcaagactgaagttcttgatgatcggtttggtattgatgtcctccggtttggttaacatcattataataaaccgtgctggtctcttgagtttttgagtcatgatccaatacgaagttttggttttgattttgattttgggtttgagagaagagagacgtagctagcttgagtatttcagggttaaccaatggatgttgttgctgatgacgatgagcatccatcatgagtcttgatatgtccacatgatgcgaagaggaattgtatagagatgatgctaagatggatgagatatcgaggagatcgagtcgtggactgtgagtcactggatcaatacccattcttagtagcttctttctgatatgtgtgttccaaaaattcttgatctcgttatctgttcttccaggcaaacgcgccgcaatcgccgaccatctataacaaaattatcaagaaaccaaacacataagaatcttgaacaatatagctcaaagaagaaattgtctgagaaaaaataaattaactaaactcacttgtttcctaagtagctatgaagctgaataatggtttcttcttcttcaaaagagaaccttccacgtttgatatctggtcggagataattagtccaccttaaccgacaactcttgccacatctctgcaaacctgatgaagaaaaaaaaatatcaaaaatggagactttggaaaatcctattattaaaaaaaacaagataaaaatacaaattaagacacgaaccggcatttttggggagggttctccagttaccatatccatgtttctggatatagtcaacaagcttctggtcttcctcagacgtccatggccctttcttgagcccgttcttctcgcaacaaggtgatcttcccat

SEQ ID NO: 196 - DNA, 1191 bp, Thlaspi arvense
  source 1..1191: mol_type = genomic DNA
ttaaattaacataaagtcgtcgaagataaaattttccggaaagccaaagtcgaagaaactgctggagttggcttctgcttcaatgctatttagttgtggagaagagtttggcgttgacatgagtgagtctaagtccaaactctctgacaaaggtggtgatacatctgcaggaccgacctcgagtcttgctttcataggctcgaaagatgaattttcattgtttgttggagttgcacactcggcctgtggctgagagtcttgagacgacactgaagtgattggagtttgaagattttggtcgaggtttgatgcataaactggattagggttttgatgtggttgttgaggtggcaagagtagagaggccaacctcaatacatcaggattaagcagagacgatgcaactgatgaaaagtttggttggttgaaaagtgcggctaaaagtgaagacaaatcaagaagatcaaggcgcggggtgtgagtaacaggatcgatgccactccttacaagtcgcttgcggatgtgagtattccaatggttctttatttcattatcggtccttcctggtagacgagctgctattgcggaccacctataaatattatccatatcattcaattagtggtatataattaatatacaactcctcttatattatattttaggtcaatacgttatggactaataataatagtttagtggagagttgatagcctaaatattgacatgtacgctccgcatgcatacgcacactctcgctttttttttgtttgaaaaattaactttaacgtaatgaatctcaaataaactatgatgtcaatgaaggcttacttgtttcccataacactgtgtaattgaatgatagtttcttcttcctcgaaggagaatcgtcctctcttgatgtccggtcttagataattggtccatcgaagacgacagctttttccgcatctttggagtcctttagtttgtacaatatacgacatatcaaatcaatatatagataatataatctttaaggacaaaactataataattgtatagatgtatatgcttaccagcatttttagggaggatacgccaattacccggaccatgaaatcgaatataatcgatgagtttctgatcttcttcaggcgtccatggtcccttcttcacaccattcttgtcacaacatggtgatcttcccat

SEQ ID NO: 197 - DNA, 1159 bp, Typha domingensis
  source 1..1159: mol_type = genomic DNA
atggggagaccaccttgctgcgataagaatggattgaagaaggggccatggacgccggaggaggacaagaagctcgtcgattacatccacaagcatggccaagggaagtggcgaaaccttccgaagaatgctggtgagtaactatatgtatattttaatattgctagctacactttataaggtgcttagttaaaagtattggacggatgagtgaatttgaactgtgttgattaggtcttgcgaggtgcgggaagagttgccggctccggtggaccaattatttgaggcccgacatcaaacgaggacgcttctcatttgaagaagaagaggccatcatccaactgcacagtgttttggggaacaagtaagatgcatatgatgagtactttgacaattttaaattacgttagtatgtatgtatgtttattaacacacacacacacacaaaaaaaaaatattcaggtggtcagcaattgcggcatgcttgccagggagaacagacaatgaaatcaagaactattggaacacccacataaggaagaggctactaagtatgggaatagatcccgttactcataaccctcgccttgatctcctggacctctccactcttcttaacccctccgtgtacaacccaaatcaatttgatatctctagtttactcggaatcgggccaattgttaactcggagctcctaaaaatagccagcgatgtcttattatctcagaatcagtactctagccttgtggcaaataccttgcaagagccacatctctcaactgcccaactccaaaatcaatttccttcgttactgcaaggtcaaatatatccaccccaaaacctagctcagtacgttgatgagtcacaactcatgcaagcccaattgcatgacctggagatgtaccatcctggcttcgacaatttgggctccagcattaatccgcagatgtcactttgcgataactccgatgtgcaagagtttaacatccagaattataacctaccatccggcttatcgacgcctgcctccagttcgacgcacttgaactcctcatcgacttatgtaaatggcagcaccgaggacgagagagacagctattgcagcaacttgttcaacctccaaattcctggccttttagatgttagcgattacatgtaa

SEQ ID NO: 198 - DNA, 1641 bp, Triticum aestivum
  source 1..1641: mol_type = genomic DNA
tctacctccatccatccgtccagttttcagttttcacactctcctggctagctagctagctcctctccatcctctacagcggctgcgagacaaactgagccttttcctgctcgccccatcgcccaatccgtctctactctacagttgtatacgcgattagatggggcgcgcgccgtgctgcgacaggaccgggctgaagaaggggccgtggacgcaggaggaggacgagaagctcgtcgcctacatcaagaagcacggccagggcaactggcgcaccctccccaggaatgccggtaagcgactcggactcatgcagctgcttgctctgccaagttggttagttagttatccaccgatcgatcccacacaataattaactgtgttgcgtctgggtgtgtgcagaccttgagcggtgcgggaagagctgccggctgcggtggaccaactacctccggccggacatcaagcgcggccgcttctccttcgaggaggaggagaccatcatccagctacacagcatcctcggcaacaagtaagaactactcacttcacatcattcaactcgacgtagtactagctaggcgtctctgttgctatagcagcagcagcagctaggcgtacggtttcctggcgagtttcattttgatgtgcttttttgcatgattgctcaggtggtcagccattgcggcgaggctgcccggacggacggacaacgagatcaagaactactggaacacgcacatccgcaagcgcctcctccgcatgggcatcgaccccgtcacccacgcgccgcgcctcgacctcctcgacctctcctcgctcctcaagcccgccgcctactaccccacacaggccgacctcgacacgctccgcgccctcgagccgctcgccaactacccggacctcctccgcctcgcctccaccctcctcgcagccccgaccacaacctcctcgcagcccacgaccgaacagcagatgctcctcccttggctgatccaggcgcagatggcgcagcaggtatctcaggcgccgcctcaacatgccacggccgcagacatgttcttgcagcccagctcggcgtgccaaatgccgggtctggttcacgcgaaccccgcgcagcaactacaccaggatcacatggtgccctctgactacgggcagctcccgggctacgacaaccagctcgagctcgactacgtgccggcgctgatgcagatggcgtcagacacgtcgaacctgcagtggagcagcccggtcacaagtagcaacaacaacaacaactgcaacgtcggctccggcgtatccacgccgtcatcgagccccgcggggcgtgtgaactcggcttcaccgacaaccttctgcgccaacgcgagcaacatcgacgccttcagcgccgacgccgccgggctgttcgacatgcacctgtccgatctcctggatgtgagcgactacatgtaatgaaaaatacaagtacgggttccacctgcatctgcatgcatgtggaagctaggtcgaacagttcatcacgtaccgaccgacagggggcaaaacatgcatacgatgatgatctcgaacgagagccgtttttgtacaggattgtaccatttttatccagttcatggtcactggttactgttagaa

SEQ ID NO: 199 - DNA, 1266 bp, Triticum aestivum
  source 1..1266: mol_type = genomic DNA
ctacatgtagtcgctcacatccaggagatcggacaggtgcatgtcgaacagcccggcggcgtcggcgctgaaggcgtcaatattgctcgtgttggcgcagaacgctgccgttgaagccgagttcacacgcccggcggggctcgatgacggcgtggatacgccggagccgacgttgcagttgttgttgttgctacttgtgaccgggctgctccactgcaggttcgacgtgtctgacgccatctgcatcagcgccggcacgtagtcgagctcgagctggttgtcgtagcccgggagctgcccgtagtcagaggccaccacgtgatcctggtgtagttgctgcgcggggttcgcgtgaaccaggcccggcatttggcacgccgagctgggctgcaagaacatgtctgcggccgtggcatgttgcggcggcgcctgaggtacctgctgcgccatctgcgcctggatcagccaagggaggagcatctgctgttgggtcgtgggctgcgaggaggttgtggtcggggctgcgaggagggtggaggcgaggcggaggaggtccgggtagttggcgagcggctcgaaggcgcggagcgtgtcgaggtcggcctgcgtggggtagtaggcggcaggcttgaggagcgaggagaggtcgaggaggtcgaggcgcggcgcgtgggtgacggggtcgatgcccatgcggaggaggcgcttgcggatgtgcgtgttccagtagttcttgatctcgttgtccgtccgtccgggcagcctcgccgcaatggctgaccacctgagcaatcatgtaaaatcaaaaccaaactcgccaggaaaccgtactacgtcgagttgaatgatgtgaactgagtgcatatatagttgttaattacgtagttcttacttgttgccgaggatgctgtggagctggatgatggtctcctcctcctcgaaggagaagcggccgcgcttgatgtccggccggaggtagttggtccaccgcagccggcagctcttcccgcaccgctccaggtctgcacacacacagacgcaacacaaccgattaattatctatctatccatcacctttgtgtgggatcgatcggttgccagagcaagcagctgtgtgagtccgagtcgcttaccggcatccttggggagggtgcgccagttgccctggccgtgcttcttgatgtaggcgatgagcttctcgtcctcctcctgcgtccacggccccttcttgagcccggtcctgtcgcagcacggcgcgcgccccat

SEQ ID NO: 200 - DNA, 1400 bp, Zea mays
  source 1..1400: mol_type = genomic DNA
ttacagcatgtagtcgctcacatcaagcagctcagacagctgcatgtcgaacagcgcggcgacgtcgtcggtgctggcgccaccgccgccgaacgtcgtggcgacgcaggtggtggagtgatccaaccgcggcaccgggctggaagacgttggtgtggacacgccggagccgacgctgttgtggttgttaccgctgctcgtcaccgtgctgttccactgctgcaggttcgtcgcgtcgggctgcgctgcctgcatcagcgccgggacgtccagagggctgtcgacgtagcccgccgtaggcggctgcatgctgtggcagaccacgtcttggggctggtgctgcgcggccgcgagctgatgctgctgcaccgtcggcgggttcgtgttgtggaccaggtccggcggcggcatttggcacgctgctccggcggcaacagcatgctgcgccatgctgatgctggcgaccgcctgctgcagaatccacggcagaagctgctgctgccggtgctcgccgatcgcgggcgcggccgggcggccggagagcagggcggaggcgaggcggaggaggtccgggtagctggcgagcggcggctccaaggcgcggagcgtgtcgaggtcggcctgcgtggggtagtacgcggcggcgggcttgaggagcgcggagaggtcgaggcgcggcgcgtgggtgacggggtcgatgcccatgcggagcaggcgcttgcggatgtgcgtgttccagtagttcttgatctcgttgtccgtccgcccgggcagccgcgccgcgatcgctgaccacctgtaggcaatataatcacgcgcatcagaaaacgtactgcgactgcgatcctcctactagctagtagtagagaaaaaaaacagcgaagctacactagccaggccagagctagctctcgacgatcgatgatatgccaggtgtgtgtgtgtgcttacttgttgccgaggatgctgtggagctggatgatagcctcctcctcctcgaaggagaagcggccgcgcttgatgtccggcctcaggtagttagtccaccgcagccggcagctcttcccgcaccgtgcgagccctgccatgacatgagaaggacgatcgaggtgagcatggatatgtgtatatatgcgcatgatcgacgtcgatcggggccagcaggtcgctcgctcaccggcattcttggggagggtgcgccagtttccctggccgtgcttcttgatgtaggcgacgagcttctcgtcctcctctggcgtccacggccccttcttcagcccgctcctctcgcagcacggcgcgcgccccatcggtggcctggatcgagactggtcgcgcggcgctcaggctcagagctgcttgctcgaagaactacaacgacgacccgcgtggaatgaagg

SEQ ID NO: 201 - DNA, 1656 bp, Zea mays
  source 1..1656: mol_type = genomic DNA
ttacatgtagtcggtcacatcaaggagctcagatagctgcatgttgaacagcgcggcggcgtcggcatcgctcgcgccgccgtacgtcgtggtggcggtggtggagtgattcaagcgcggcaccgggctggacgacggtgtggacacgccggagccgacgttgttgttgttggtgctgcttgtgatcatgctgctccactgctgcaggttcgacgcgtcgtcggcctgcaccatctgcatcagcgctgggatgtcgagggtgtcgacggcgtagccgcccgtaggcggctgcggctgcatgctgtggcaagccgcggccatgtcgtcctggccctggggctggtgttgctgctcctgcgcggccgcgacctgctggtgctgctgcaccgtcgggctcgtgtggaccaggtccggcatttggcacgcggctccagccgcctgccgctgctgcacgaactgttcggcctgcggcgccacctgcagctgcgcctgcgccacggcggcggccgcctgctgcgccatctgcgcctgcagaatccacggcagaagctgccgcggttgctggtcgccgatcgcgggcgccgccggcgggccagagagcagggcggaggcgaggcggaggaggtccgggtagttggcgagcggctccaaggctcggagcgtgtcgaggtcggcctgcgtggggtagtacgcggcggcggcggcgggcttgaagagcgcggagaggtcgaggaggtcgaggcgcggcgcgtgggtgacggggtcgatgcccatgcggagcaggcgcttgcggatgtgcgtgttccagtagttcttgatctcgttgtccgtccgcccgggcagccgcgccgcgatcgctgaccacctaattaaccaccagtagccaatcacgccatcagaaaccgtactgcgcctagctactactccagtccagtagagcaaaaacagcgaagctacacaaagccaagccaagcgaagccagaatagctaggatgctactacttacttgttgccgaggatgctgtggagctggatgattgtctcctcctcgtcgaaggagaagcggccgcgcttgatgtccggcctcagatagttagtccaccgtagccggcagctcttcccgcaccgtgcgagccctgtgtgtcacgagaaggatcgatgtgtcacgagatgcatgaatatgtctacactatatgcgtaggattcatgggacgagagttccgtcggggtcagggcggcgctcaccggcattcttggggagggtgcgccagttgccctggccgtgcttcttgatgtaggcgacgagcttctcgtcctcctcgggcatccacggccctttcttcagcccgctcttctcgcagcacggcgcgcgccccatcggtaatgaatgacttggattaaccggtggctagctcaggcgcgcagagaactgctagctccctccaagaactacaaacgaaccggcaggtagaaggatagctgcaggcaggcttgggacgacggcgacgcagcccgtgtggaagatgatgaagaagaagggcgggcgagcaagcgagcaagagattgaaaaggtctggtttgtcacgctgctgcaggacagcaggctccagctacaggggtgtgaaactgagctcgagcaaagaaggaaggaacaag

SEQ ID NO: 202 - DNA, 1098 bp, Arabidopsis thaliana
  source 1..1098: mol_type = other DNA
atggggaggtcgccttgttgcgacgagaatggtctaaagaaagggccatggactcctgaagaagatcaaaagcttattgattacattcataaacatggtcatggaagctggagagctctccccaagctcgcagatttgaataggtgtggaaagagttgtagactgaggtggacaaattatttgagaccagacatcaaaagaggaaagttttcagccgaagaagagcaaacaatcctccatctccactccattctcgggaataaatggtcagctattgcgacgcatttgcaaggtcgtacagataatgagataaaaaacttttggaacacacatctaaagaagaaattgatccagatggggatcgatcctgtgactcatcagccaagaaccgacctcttcgcaagtttacctcagctcatagccttggcaaatctaaaagacctaatcgaacaaacatcacaattctcatccatgcaaggcgaagcagcccaactagccaatctacaatatctccaacgtatgtttaattcttcggcttcattaaccaacaacaacggcaacaattttagcccgagtagtattctcgatatcgatcagcaccatgccatgaacctcttaaactccatggtctcttggaacaaagatcaaaaccccgcttttgatccggttcttgaactcgaggctaacgatcaaaatcaagatttatttccactagggtttatcattgatcaacccacccaaccactccaacaacaaaaataccatttaaacaatagtcctagtgagctaccatcgcaaggtgacccacttcttgatcatgtccctttcagtctccaaacacctttgaatagtgaggatcactttatagataatttggtcaaacatccaactgatcatgagcatgaacatgatgacaatccatcttcatgggttctcccttctcttatagacaataaccctaaaactgtcacgtcttctcttccacacaacaatccggcggatgcaagtagcagctcaagctatggaggttgtgaagctgcgtcgttttattggcctgacatttgcttcgacgaaagcctcatgaacgttatatcttag

SEQ ID NO: 203 - DNA, 1002 bp, Arabidopsis thaliana
  source 1..1002: mol_type = other DNA
atggtacggacgccgtgttgtagagcagaagggttgaagaaaggagcatggactcaagaagaagaccaaaagcttatcgcctatgttcaacgacatggtgaaggcggttggcgaacccttccggacaaagctggactcaaaagatgtggcaaaagctgcagattgagatgggcgaattacttaagacctgacattaaacgtggagagtttagccaagacgaggaagattccatcatcaacctccacgccattcatggcaacaaatggtcggccatagctcgtaaaataccaagaagaacagacaatgagatcaagaaccattggaacactcacatcaagaaatgtctggtcaagaaaggtattgatccgttgacccacaaatcccttctcgatggagccggtaaatcatctgaccattccgcgcatcccgagaaaagcagcgttcatgacgacaaagatgatcagaattcaaataacaaaaagttgtcaggatcatcatcagctcggtttttgaacagagtagcaaacagattcggtcatagaatcaaccacaatgttctgtctgatattattggaagtaatggcctacttactagtcacactactccaactacaagtgtttcagaaggtgagaggtcaacgagttcttcctccacacatacctcttcgaatctccccatcaaccgtagcataaccgttgatgcaacatctctatcctcatccacgttctctgactcccccgacccgtgtttatacgaggaaatagtcggtgacattgaagatatgacgagattttcatcaagatgtttgagtcatgttttatctcatgaagatttattgatgtccgttgagtcttgtttggagaatacttcattcatgagggaaattacaatgatctttcaagaggataaaatcgagacgacgtcgtttaatgatagctacgtgacgccgatcaatgaagttgatgactcctgtgaagggattgacaattattttggatga

SEQ ID NO: 204 - DNA, 966 bp, Arabidopsis thaliana
  source 1..966: mol_type = other DNA
atggggagatcaccgtgttgcgatgagagcggattaaagaaagggccatggacgccagaagaagatcagaaactgataaatcacataagaaaacacggccatggaagctggagagctctacccaagcaagccggtttaaaccggtgtgggaagagttgcagattgagatggactaattacttgagaccagatatcaaaagaggaaacttcacagctgaggaagaacaaactatcattaaccttcattctcttcttgggaacaagtggtcgtctatagctggtcatctcccaggaagaacggataacgaaataaagaactattggaacacgcatattagaaagaaacttattcagatgggaatcgatccggtgacccataggccaagaaccgaccatctaaacgttctagccgctctcccgcaactactagctgccgcaaatttcaacaacctcttgaatctaaatcaaaatatacaattggatgcaacaagtgttgcgaaagcccaactgttacatagtatgattcaagtccttagcaacaacaatacctcttcttcctttgacattcatcacacaaccaataatctctttggccaatcttctttcttagagaacctaccaaatattgaaaatccttatgatcaaacccaaggcctctctcacattgacgatcagcctctggattcgttttctagcccgattcgagtagttgcttatcaacatgatcagaattttattccgcccttgatttcgacatctcctgatgagtctaaggaaacccaaatgatggtcaagaacaaggaaatcatgaagtataatgatcatacttcaaacccttcgtcgacctcaacttttacacaagatcaccagccatggtgtgacataattgatgatgaagcaagtgattcttattggaaagagatcatagagcaaacttgttcggagccttggccatttcgtgaatag

SEQ ID NO: 205 - DNA, 924 bp, Arabidopsis thaliana
  source 1..924: mol_type = other DNA
atgagagagaagtgggaaatgaaaagagatgaaatgggacatcgatgttgtggaaaacacaaagtgaagagaggtctttggtctccagaggaagacgagaagcttcttcgttatatcaccactcatggtcatcctagttggagttccgttccaaagcttgccgggttgcagagatgtgggaagagttgcagattaaggtggataaactatctaaggcctgatctgaggagaggttcgtttaatgaggaagaagagcagattatcatcgacgtacatcgtattcttggtaacaaatgggctcagattgctaagcacttacctggacgcactgataatgaagtcaagaacttttggaactcatgcattaagaagaaacttctttctcaaggcttagatccttctacacataatcttatgccttcacacaaaagatcttcttcttcaaacaataataatatccccaagccaaacaaaacgacgtccatcatgaagaaccctactgatcttgatcaatcaaccactgctttttcaatcacaaacatcaatccacccacttccactaaaccaaacaaacttaaatctcctaaccagactacaatcccatctcaaaccgtgatccctatcaatgataacatgtcaagtactcaaaccatgatccctatcaatgatcccatgtcaagtcttttagatgatgagaatatgattcctcactggtcagatgttgatggaatggcgatccacgaagctccgatgttgcctagtgataaggcagtagtgggagtggatgatgatgatctcaacatggacattttgtttaacactccttcttcttctgcttttgatcctgattttgcttccattttctcctctgcaatgtctatcgatttcaatcccatggatgatcttggcagctggaccttttag

SEQ ID NO: 206 - DNA, 933 bp, Arabidopsis thaliana
  source 1..933: mol_type = other DNA
atgggaagagcaccgtgttgtgacaaagcaaacgtgaagaaagggccttggtctcctgaggaagatgcaaaactcaaatcttacattgaaaatagtggcaccggaggcaattggatcgctttgcctcaaaagattggtttaaagagatgtggaaagagttgcaggctgaggtggcttaactatcttagaccaaacatcaaacatggtggcttctctgaggaagaagaaaacatcatttgtagcctttaccttacaattggtagcaggtggtctataatcgctgctcaattgccgggacgaacagacaacgatataaaaaactattggaacacgaggctcaagaagaaactcattaacaaacaacgcaaggagcttcaagaagcttgtatggagcagcaagagatgatggtgatgatgaagagacaacaccaacaacaacaaatccaaacttcttttatgatgagacaagaccaaacaatgttcacatggccactacatcatcataatgttcaagttccagctcttttcatgaatcaaaccaactcgttttgcgaccaagaagatgttaagccagtgctcatcaagaacatggtcaagatcgaagatcaagaactggagaaaacaaaccctcatcatcatcaagattcaatgacaaacgcttttgatcatctctctttctctcaactcttgttagatcctaatcataaccacttaggatcaggcgagggtttctccatgaactctatcttgagcgccaacacaaactctccattgcttaatacaagtaatgataatcagtggttcgggaatttccaggccgaaaccgtaaacttgttctcaggagcctccacaagtacttcggcagatcaaagcactataagttgggaagacataagctctcttgtttattctgattcaaagcaatttttttaa

SEQ ID NO: 207 - DNA, 975 bp, Arabidopsis thaliana
  source 1..975: mol_type = other DNA
atgggacgatcaccatgttgtgagaagaagaatggtctcaagaaaggaccatggactcctgaggaggatcaaaagctcattgattatatcaatatacatggttatggaaattggagaactcttcccaagaatgctgggttacaaagatgtggtaagagttgtcgtctccggtggaccaactatctccgaccagatattaagcgtggaagattctcttttgaagaagaagaaaccattattcaacttcacagcatcatgggaaacaagtggtctgcgattgcggctcgtttgcctggaagaacagacaacgagatcaaaaactattggaacactcacatcagaaaaagacttctaaagatgggaatcgacccggttacacacactccacgtcttgatcttctcgatatctcctccattctcagctcatctatctacaactcttcgcatcatcatcatcatcatcatcaacaacatatgaacatgtcgaggctcatgatgagtgatggtaatcatcaaccattggttaaccccgagatactcaaactcgcaacctctctcttttcaaaccaaaaccaccccaacaacacacacgagaacaacacggttaaccaaaccgaagtaaaccaataccaaaccggttacaacatgcctggtaatgaagaattacaatcttggttccctatcatggatcaattcacgaatttccaagacctcatgccaatgaagacgacggtccaaaattcattgtcatacgatgatgattgttcgaagtccaattttgtattagaaccttattactccgactttgcttcagtcttgaccacaccttcttcaagcccgactccgttaaactcaagttcctcaacttacatcaatagtagcacttgcagcaccgaggatgaaaaagagagttattacagtgataatatcactaattattcgtttgatgttaatggttttctccaattccaataa

SEQ ID NO: 208 - DNA, 711 bp, Arabidopsis thaliana
  source 1..711: mol_type = other DNA
atgggaagatctccttgttgtgaaaaagctcacacaaacaaaggagcttggactaaagaagaagatcaacgtctcgtagattatatccgtaatcacggtgaaggttgttggcgttctcttcctaaatccgctggattgttgcgttgtggtaaaagttgtagattgagatggattaattaccttcgtcctgatcttaaacgtggtaattttactgatgatgaagatcaaatcatcatcaaactccatagcttactcggtaacaaatggtcattgatagctggaagattaccaggaagaacagataacgaaataaagaattattggaacactcatattaagaggaagcttcttagtcacggtattgatccacaaactcatcgtcagattaacgaatccaaaacggtgtcgtctcaagttgttgttcctattcaaaacgatgccgttgagtattctttttccaatttagccgttaaaccgaagacggaaaattcctccgataacggagcttcgactagcggcacgacgacggacgaggatctccggcagaatggggagtgttattatagtgataattcaggacatataaagctgaatttggatttaactcttgggtttggatcctggtcgggtcggatagtcggagtcgggtcatcggctgattctaaaccgtggtgcgacccggtgatggaggcgcgtttgtcactgttgtaa

SEQ ID NO: 209 - DNA, 1083 bp, Arabidopsis thaliana
  source 1..1083: mol_type = other DNA
atgggaagatcaccgtgttgcgatcaagacaaaggcgtgaagaaaggaccgtggctgccagaagaagatgataagctcactgcttatataaacgagaatggttatgggaattggcggtcgcttcctaagctcgctggacttaaccgctgtggcaagagctgtcggctccggtggatgaattatctccggcctgatatccggagaggcaaattttccgatggagaagagagtactatcgttagactccatgccctccttggcaacaaatggtcgaaaattgcgggtcatcttccaggaagaacagataatgaaattaaaaactattggaacactcatatgaggaagaagttattgcaaatggggattgatccagtgacgcacgagccaagaaccaacgatcttagccctatcctcgatgtttctcaaatgctcgcggcagcaatcaacaatggccaatttggtaacaataacctcctcaacaataacaccgctttggaagatattcttaaactccaattgatccataaaatgcttcaaatcataacccccaaagccataccaaacatcagtagcttcaagaccaatttactgaatcctaaaccagaaccggtagtcaatagcttcaataccaattcagtgaatcctaaaccggatcccccggctggtcttttcataaaccaaagtggaatcactcctgaggccgcctcggatttcattccatcttatgaaaatgtttgggatggttttgaagataaccagcttcctggtttggttacggtttctcaagagagtttaaatacagcaaaaccgggtaccagtacgaccaccaaggtaaatgatcatatcagaaccggtatgatgccgtgttactatggtgatcaactactagaaaccccatctactggttcggtatcggtctctcccgagacaaccagtttgaaccatcccagtacagctcaacactcatccggttcagatttcctagaggactgggagaagtttcttgatgatgaaacaagtgattcttgctggaaaagtttcttagacttaacgtcacccacatcgtcacctgtcccatggtag

SEQ ID NO: 210 - DNA, 1053 bp, Arabidopsis thaliana
  source 1..1053: mol_type = other DNA
atggcaaggtcaccttgttgcgagaagaacggactcaagaaagggccttggacatctgaagaagaccagaagcttgttgactatatccagaaacatggttatggtaactggagaaccctccccaaaaatgccggtttgcaaagatgtggcaaaagttgtaggttaaggtggactaattatctccgaccagatataaagcgaggaaggttctcttttgaggaagaagaaaccattattcagcttcatagcttcttaggaaacaagtggtctgcgattgcggcgcgtttaccaggaagaacagataatgagatcaagaacttttggaacactcatataagaaagaagctacttagaatggggattgatccagtgactcacagtccacgactcgatctcctcgatatctcatccatcttagcttcatctctatacaattcatcttcacatcacatgaacatgtcaagactcatgatggatactaatcgtcgtcatcaccagcaacatccattggttaaccccgagatactcaagctcgctacctctctcttctctcaaaatcaaaaccaaaaccttgtggtggatcatgactcgagaactcaagagaagcaaacagtttatagccaaaccggagtaaaccaataccaaaccaaccaatatttcgagaacacgattactcaagaactccaatcttccatgccaccattccccaatgaagctcgtcagtttaacaacatggatcatcacttcaatggttttggagaacaaaatcttgtttcaacttctactacgtcagtccaagattgctataatccgtcattcaacgattattcaagttcaaattttgtcttggatccttcttattcggatcagagcttcaacttcgcaaattcggtcttaaacacgccatcctcgagcccgagcccgactacgttaaactcgagttacatcaatagtagcagttgcagcactgaggatgaaatagaaagctattgcagtaatctcatgaagtttgatattcccgatttcttggacgttaatggttttattatataa

SEQ ID NO: 211 - DNA, 849 bp, Arabidopsis thaliana
  source 1..849: mol_type = other DNA
atgggaaggtcaccgtgctgtgagaaagctcacacaaacaaaggagcatggacgaaagaagaggacgagaggctcgtcgcctacattaaagctcatggagaaggctgctggagatctctccccaaagccgccggacttcttcgctgtggcaagagctgccgtctccggtggatcaactatctccggcctgaccttaagcgtggaaacttcaccgaggaagaagacgaactcatcatcaagctccatagccttcttggcaacaaatggtcgcttattgccgggagattaccgggaagaacagataacgagataaagaactattggaacacgcatatacgaagaaagcttataaacagagggattgatccaacgagtcatagaccaatccaagaatcatcagcttctcaagattctaaacctacacaactagaaccagttacgagtaataccattaatatctcattcacttctgctccaaaggtcgaaacgttccatgaaagtataagctttccgggaaaatcagagaaaatctcaatgcttacgttcaaagaagaaaaagatgagtgcccagttcaagaaaagttcccagatttgaatcttgagctcagaatcagtcttcctgatgatgttgatcgtcttcaagggcatggaaagtcaacaacgccacgttgtttcaagtgcagcttagggatgataaacggcatggagtgcagatgcggaagaatgagatgcgatgtagtcggaggtagcagcaaggggagtgacatgagcaatggatttgattttttagggttggcaaagaaagagaccacttctcttttgggctttcgaagcttggagatgaaataa

SEQ ID NO: 212 - DNA, 1005 bp, Arabidopsis thaliana
  source 1..1005: mol_type = other DNA
atgggaagatctcctatctctgatgactctggtctcaagaaaggtccttggactcctgatgaagatgagaaacttgtcaactatgttcaaaaacatggtcatagtagctggagagcccttcccaaactcgctggtcttaacaggtgtgggaagagttgcaggctaagatggacgaactacttgagaccagacatcaagagagggagattctctccggacgaggaacagactatcttgaatcttcattcagttcttggaaacaagtggtcaacgattgcgaatcagttaccagggagaacagataacgagatcaagaatttctggaacactcatttgaagaagaagctgattcagatgggttttgatccaatgactcaccgtccaagaaccgatatcttctccggcttatctcagctcatgtctttgtcttctaacctgagaggctttgttgatctgcaacaacagtttcctattgatcaagaacacactatactcaaactccaaaccgagatggccaaactccaattgttccaataccttcttcaaccgtcttccatgagtaacaatgttaaccctaatgactttgacactctcagtctccttaactctattgcctctttcaaagagaccagtaataataccaccagcaacaatctcgacctcggtttcctcggctcttatcttcaggacttccacagcttaccttccctgaaaaccctaaattccaacatggaaccatcatctgttttcccccagaatcttgatgacaatcacttcaaattctccactcaaagagaaaacctacccgtgtctccaatctggctctcggatccatccagcacaactcctgctcatgtgaatgatgatctgatttttaaccaatacggtattgaagatgtcaatagcaatatcacatcttcaagcggtcaagaatcaggagcttcagcttcagctgcatggcctgatcatctattggatgattctatattttccgacattccttag

SEQ ID NO: 213 - DNA, 1011 bp, Arabidopsis thaliana
  source 1..1011: mol_type = other DNA
atggggcgatcaccatgttgcgatgagaatggtctaaagaaagggccatggacacaagaggaggatgataaactgatagatcacattcaaaaacatggccatggcagctggagagctcttccaaagcaagccggtttaaaccgatgcggaaagagttgtagattaagatggaccaactacttgagacctgacatcaagagaggaaatttcactgaagaggaagaacaaactattatcaacctccattcccttcttggaaacaagtggtcgtcgatagccggtaatcttcctggaagaacggacaatgaaataaaaaactattggaacacacatttgagaaagaaacttctccaaatggggattgatccggtgacccataggccaagaaccgaccatctaaacgttttagcagctctcccgcagcttatagccgccgcaaatttcaacagcctcttgaatctcaaccaaaatgtgcaactggatgcaacaactcttgctaaagctcaactgctacacactatgattcaagtccttagcaccaataacaacaccaccaatccttctttttcttcatcaactatgcaaaacagtaacaccaatctctttggccaagcttcttacttagagaaccaaaatctttttggtcagtctcaaaacttctctcacattcttgaggatgagaatttgatggtcaaaacccaaattattgataaccctttggactctttttcttcccccatacaacccggttttcaagatgatcataattcactccctctattggttccggcgtctcctgaagaatctaaagaaactcaaaggatgatcaagaacaaagacatcgtcgattaccatcatcatgatgcttcaaacccttcatcatcaaactcaacgtttacacaagatcatcatcacccatggtgtgacactattgatgatggagcaagtgattctttttggaaagagataatagagcaaacttgttcggaaccatggccatttcctgaatag

SEQ ID NO: 214 - DNA, 1002 bp, Arabidopsis thaliana
  source 1..1002: mol_type = other DNA
atgggaagagctccatgctgcgacaaggcaaacgtgaagaaaggaccatggtcaccggaagaagatgtgaagctcaaggattacatcgacaaatatggcactggtggcaactggatcgcactgcctcagaaaattgggctgaagagatgtggtaagagttgcagactgagatggcttaattacttaagaccaaacatcaaacatggtggtttttctgaggaagaagatagaatcatcttgagtctctacattagcattggaagccggtggtccataattgcagctcagcttcctggaaggactgacaatgatatcaagaattattggaacacaaaactgaagaagaaacttctaggaagacagaaacaaatgaatcgtcaagactccataaccgattctactgagaacaacctcagcaacaataacaacaataagagtcctcagaatctgagcaattcggcactggagaggctccagcttcacatgcagcttcagaatctacagagccctttctctagtttctacaacaaccctatcttgtggcccaagcttcatccattgctccagagcactacaactaatcaaaaccctaagcttgcatctcaagaaagcttccaccctttaggagttaacgttgatcatcagcacaacaataccaagctagctcagataaacaatggagcctcttctctctattcggagaacgtagagcaatcccaaaaccctgctcatgaatttcaacctaatttcggtttttcacaggaccttcgattagataatcataacatggactttatgaacagaggggtttctaaagaactgtttcaagtgggcaacgagtttgagctaacgaacggttcgagttggtggtcagaggaagtggaactagagaggaaaacgacgtcgtcgagttcttgggggtcagcttctgtgcttgatcagacaactgagggaatggttatgcttcaagattacgctcagatgagctaccacagtgtttaa

SEQ ID NO: 215 - DNA, 933 bp, Arabidopsis thaliana
  source 1..933: mol_type = other DNA
atgggaagatctcctagctcagatgaaactggtctgaagaaaggtccatggttgcctgaagaagatgataaactgatcaattatattcacaaacatggccatagcagctggagtgcccttcccaagctcgctggtcttaacaggtgtgggaagagttgcaggctacgatggacaaactatttgagaccagacattaagcgaggaaaattctctgcggaggaagaagagaccatcctgaaccttcatgcggttctaggcaacaagtggtcaatgattgcaagccacttacctggacgaactgacaatgagatcaagaatttctggaatactcatttgaagaaaaagctgattcagatgggttttgaccccatgacccatcagccaagaaccgatgatatcttctcaagtttatctcagctcatgtctctgtctaacctaagaggacttgttgatctgcagcaacagtttccaatggaagaccaagcgctacttaatctccaaactgagatggctaagctccaattgttccaataccttcttcaaccttctcctgctcccatgagtatcaacaacattaaccctaacattctcaatctcctcatcaaagaaaactccgttaccagtaatatcgacctcggtttcctctcctctcatcttcaagacttcaacaacaacaacctcccttccctcaaaaccctagacgataatcacttcagtcaaaacacttctccaatatggctccatgaaccaccgagcttgaaccaaactatgttgcctacgcatgatccttgtgctcagagtgtagatggtttcggcagcaaccaagcctcctcaagccatgatcaagaagtagcagtcacagactctgtagattggcctgatcatcatctatttgatgattccatgtttccagacatttcttatcaatcttaa

SEQ ID NO: 216 - DNA, 1125 bp, Arabidopsis thaliana
  source 1..1125: mol_type = other DNA
atgggaagagcaccgtgttgtgataaggccaacgtgaagaaagggccttggtctcctgaggaagacgccaaactcaaagattacatcgagaatagtggcacaggaggcaactggattgctttgcctcagaaaattggtttaaggagatgtgggaagagttgcaggctaaggtggctcaactatttgagaccaaacatcaaacatggtggcttctccgaggaagaagacaacatcatttgtaacctctatgttactattggtagcaggtggtctataattgctgcacaattgccgggaagaaccgacaacgatatcaaaaactattggaacacgaggctgaagaagaagcttctgaacaaacaaaggaaagagttccaagaagcgcgaatgaagcaagagatggtgatgatgaaaaggcaacaacaaggacaaggacaaggtcaaagtaatggtagtacggatctttatcttaacaacatgtttggatcatcaccatggccattactaccacaacttcctcctccacatcatcaaatacctcttggaatgatggaaccaacaagctgtaactactaccaaacgacaccgtcttgtaacctagaacaaaagccattgatcacactcaagaacatggtcaagattgaagaagaacaggaaaggacaaaccctgatcatcatcatcaagattctgtcacaaacccttttgatttctctttctctcagcttttgttagatcccaattactatctgggatcaggagggggaggagaaggagattttgctatcatgagcagcagcacaaactcaccattaccaaacacaagtagtgatcaacatccaagtcaacagcaagagattcttcaatggtttgggagcagtaactttcagacagaagcaatcaacgatatgttcataaacaacaacaacaacatagtgaatcttgagaccatcgagaacacaaaagtctatggagacgcctcagtagccggagccgctgtccgagcagctttgggcggagggacaacgagtacatcggcggatcaaagtacaataagttgggaggatataacttctctagttaattccgaagatgcaagttacttcaatgcgccaaatcatgtgtaa

SEQ ID NO: 217 - DNA, 1576 bp, Arabidopsis thaliana
  source 1..1576: mol_type = genomic DNA
ttacaagagagataataagacaacctaatcagagagagatggggaggtcgccttgttgcgacgagaatggtctaaagaaagggccatggactcctgaagaagatcaaaagcttattgattacattcataaacatggtcatggaagctggagagctctccccaagctcgcaggttttttcctttccctagtctcttaactcaatccatgatcattttatataaacttgtatacgtatatatggattatttgaattgtatagttttgaaacttcttgtttttcttttcagatttgaataggtgtggaaagagttgtagactgaggtggacaaattatttgagaccagacatcaaaagaggaaagttttcagccgaagaagagcaaacaatcctccatctccactccattctcgggaataagtaagtgactaaacatatattcattttttttttgttataaaactttgaatgactaatactttttttttttatcatgtatagatggtcagctattgcgacgcatttgcaaggtcgtacagataatgagataaaaaacttttggaacacacatctaaagaagaaattgatccagatggggatcgatcctgtgactcatcagccaagaaccgacctcttcgcaagtttacctcagctcatagccttggcaaatctaaaagacctaatcgaacaaacatcacaattctcatccatgcaaggcgaagcagcccaactagccaatctacaatatctccaacgtatgtttaattcttcggcttcattaaccaacaacaacggcaacaattttagcccgagtagtattctcgatatcgatcagcaccatgccatgaacctcttaaactccatggtctcttggaacaaagatcaaaaccccgcttttgatccggttcttgaactcgaggctaacgatcaaaatcaagatttatttccactagggtttatcattgatcaacccacccaaccactccaacaacaaaaataccatttaaacaatagtcctagtgagctaccatcgcaaggtgacccacttcttgatcatgtccctttcagtctccaaacacctttgaatagtgaggatcactttatagataatttggtcaaacatccaactgatcatgagcatgaacatgatgacaatccatcttcatgggttctcccttctcttatagacaataaccctaaaactgtcacgtcttctcttccacacaacaatccggcggatgcaagtagcagctcaagctatggaggttgtgaagctgcgtcgttttattggcctgacatttgcttcgacgaaagcctcatgaacgttatatcttagttactcttggtttagtgttttttttttagatctctgttattttatacaagttttttatttggtgttggtgttttgtaagtagaaaaggtgcgaatgtgtgatccgtttatccctttatgtaattaaacaggagatctctgtgatccgttagtcttttgtttattttttatctttaccttgttttgtattgttgagatgttattgcattgttactaaagtttacagaactaaatcaccttgtt

SEQ ID NO: 218 - DNA, 2021 bp, Arabidopsis thaliana
  source 1..2021: mol_type = genomic DNA
tgaaaaactacaaatccacgtgtcaaacacttgaaaacgacggcgtcggctacacacgagccatgccaaatcaagataaaaagctctacgttccttctttaaatttcttacttggctgaacatacaaaactccctcttctctatcttcttcatcttaaagaaaaaataagagatattcgtaaagagagaacacaaaatttcagtttacgaaaagctagcaaagtcgagtatcgaggaataacagaataagacgtatctatccttgccttaatgttcttaccaaaagatctagtcctttctttgtatgatcgatccatcacaagcccacaacaacaacaactacatctctttctctatctctagcttctattattaatacattcaagaatcaagaatggtacggacgccgtgttgtagagcagaagggttgaagaaaggagcatggactcaagaagaagaccaaaagcttatcgcctatgttcaacgacatggtgaaggcggttggcgaacccttccggacaaagctggtatgtatttattttacttcaattattattattatcgctaattaatttggaatatgcaatcagcttttagttgcatctaataatttaatgcttttaatcattatgaaattattataggactcaaaagatgtggcaaaagctgcagattgagatgggcgaattacttaagacctgacattaaacgtggagagtttagccaagacgaggaagattccatcatcaacctccacgccattcatggcaacaagtaagttttaactatataatgatgaccatcgacaggcctaaggacaagaacataggcacacatttttatatattttttcataacatatatatgtcatatgatgtacgactgatttcaaattattaatatgattttaaataaggattacagacgaaaagattctttaatgttattataaaataatttgactggacgcaataatttagctagctaggatgtaaaggtagaaaaaaaatatcctttaataatccacaaaatgtgtattcctaaagtaatggtatctagtgaggatttggtatgtaaatatacacatttgctaataaataatgttttgttgattagatggtcggccatagctcgtaaaataccaagaagaacagacaatgagatcaagaaccattggaacactcacatcaagaaatgtctggtcaagaaaggtattgatccgttgacccacaaatcccttctcgatggagccggtaaatcatctgaccattccgcgcatcccgagaaaagcagcgttcatgacgacaaagatgatcagaattcaaataacaaaaagttgtcaggatcatcatcagctcggtttttgaacagagtagcaaacagattcggtcatagaatcaaccacaatgttctgtctgatattattggaagtaatggcctacttactagtcacactactccaactacaagtgtttcagaaggtgagaggtcaacgagttcttcctccacacatacctcttcgaatctccccatcaaccgtagcataaccgttgatgcaacatctctatcctcatccacgttctctgactcccccgacccgtgtttatacgaggaaatagtcggtgacattgaagatatgacgagattttcatcaagatgtttgagtcatgttttatctcatgaagatttattgatgtccgttgagtcttgtttggagaatacttcattcatgagggaaattacaatgatctttcaagaggataaaatcgagacgacgtcgtttaatgatagctacgtgacgccgatcaatgaagttgatgactcctgtgaagggattgacaattattttggatgagttatattgatgatgatgaaaatttgcatttggcatgtaaatcaattagagtttgatttgctatggtgtttttagtttgtgtgtgtagtgtgtttcgaccgtttgtgaattttgacgttgttagcttcataagaaactaaaattgataaaactttagaatactgaa

SEQ ID NO: 219 - DNA, 1995 bp, Arabidopsis thaliana
  source 1..1995: mol_type = genomic DNA
tttcttagcaaaagtgtgttaaaacacaaaggatatatatattatgcttctgattaaaccccattattttctcttttcttttgttaactttttgtccaggtacatttaatagctagatgttataacaaaatggggagatcaccgtgttgcgatgagagcggattaaagaaagggccatggacgccagaagaagatcagaaactgataaatcacataagaaaacacggccatggaagctggagagctctacccaagcaagccggtttaaaccggtgtgggaagagttgcagattgagatggactaattacttgagaccagatatcaaaagaggaaacttcacagctgaggaagaacaaactatcattaaccttcattctcttcttgggaacaagtaatcaatcttaatttatttcttcttaaattcccttacttactttgattaattataaattatatatatgtgagattatcatcaagagcaaaaatcagaaaacacatcaatattttctattaattaatcaatattattgtgctatagaattttttactgctttttattattagtgattttaatagaacttttttgctaacactttagaatttcattttgataaaaaaattcaagaagaagaaaatttaactacaggatggtaatgtttgattagataggttctaggcaaaaaagaaacatttcttttattaaatacagattaaaatttaaaatttctaatatcttagtctctttttcagtcggtcttatttatagatcacatatatatagtctaaaagtatatatttttatatatgctattataatttatttttttgttagttgaggtatagacgcatttatatgaataacctgctacactggagttttcttggtacatgcatacgtactcgtcaatgttcgatactaccaagtctataattagttatcttattagagcttgacaatgttatataatagtataaagcttaactaacccaccaaaaaacatatttttgtccatattttctaaaggtggtcgtctatagctggtcatctcccaggaagaacggataacgaaataaagaactattggaacacgcatattagaaagaaacttattcagatgggaatcgatccggtgacccataggccaagaaccgaccatctaaacgttctagccgctctcccgcaactactagctgccgcaaatttcaacaacctcttgaatctaaatcaaaatatacaattggatgcaacaagtgttgcgaaagcccaactgttacatagtatgattcaagtccttagcaacaacaatacctcttcttcctttgacattcatcacacaaccaataatctctttggccaatcttctttcttagagaacctaccaaatattgaaaatccttatgatcaaacccaaggcctctctcacattgacgatcagcctctggattcgttttctagcccgattcgagtagttgcttatcaacatgatcagaattttattccgcccttgatttcgacatctcctgatgagtctaaggaaacccaaatgatggtcaagaacaaggaaatcatgaagtataatgatcatacttcaaacccttcgtcgacctcaacttttacacaagatcaccagccatggtgtgacataattgatgatgaagcaagtgattcttattggaaagagatcatagagtaagttagagatcacatatatatatatttttttcttaaatcttgaattttgacgaactcttatttgtttttttggttgttctctccgcaggcaaacttgttcggagccttggccatttcgtgaatagagatgaaagtaaaacattagtcttatttttttctgtggatatagatatatacatatacgttgttaattaactttcatacaatttgtgtcttaattattttccaaccatgtatacaaacacattgatactgtacaaaactgattatcattatatataagaaaattaattcatgactc

SEQ ID NO: 220 - DNA, 1428 bp, Arabidopsis thaliana
  source 1..1428: mol_type = genomic DNA
agaaaaaaatgagacactgatttggaaaattctcagcttttcaaaactagtgaaaagcagaaagtggcaattattcatatatatacacttgagaaaatgaaaatattgtagagtaaaagctaaaaggtccagctgccaagatcatccatgggattgaaatcgatagacattgcagaggagaaaatggaagcaaaatcaggatcaaaagcagaagaagaaggagtgttaaacaaaatgtccatgttgagatcatcatcatccactcccactactgccttatcactaggcaacatcggagcttcgtggatcgccattccatcaacatctgaccagtgaggaatcatattctcatcatctaaaagacttgacatgggatcattgatagggatcatggtttgagtacttgacatgttatcattgatagggatcacggtttgagatgggattgtagtctggttaggagatttaagtttgtttggtttagtggaagtgggtggattgatgtttgtgattgaaaaagcagtggttgattgatcaagatcagtagggttcttcatgatggacgtcgttttgtttggcttggggatattattattgtttgaagaagaagatcttttgtgtgaaggcataagattatgtgtagaaggatctaagccttgagaaagaagtttcttcttaatgcatgagttccaaaagttcttgacttcattatcagtgcgtccaggtaagtgcttagcaatctgagcccatttgttaccaagaatacgatgtacgtcgatgataatctgctcttcttcctcattaaacgaacctctcctcagatcaggccttagatagtttatccaccttaatctgcaactcttcccacatctctgcaaccctatacacacatatagatactgttaggattaatccacatcgagcatatagtatataaaaaacataggctaattcactcattgctaattagttttgaattgaaagactattattttttcacatgttgtatgtttagactcatgaacaaaaaatagtaaaaagaaaagggaagtagagatagaagatacaaaaccggcaagctttggaacggaactccaactaggatgaccatgagtggtgatataacgaagaagcttctcgtcttcctctggagaccaaagacctctcttcactttgtgttttccacaacatcgatgtcccatttcatctcttttcatttcccacttctctctcatcttcctaacttatatattacaaggtctcttggtgttgattaaccagcagggtggtcactatttgatgtattttccctgatcagtactaatatctttcttgggagaattaatctactatatatgattaaccaaacttgtgtcgtttctctttttttctctgtgtgtcttcaaatggaagcctgattagagacac

SEQ ID NO: 221 - DNA, 1547 bp, Arabidopsis thaliana
  source 1..1547: mol_type = genomic DNA
atcttttcttacaaagactttttgacatctccccctccagctattatatagtctccttttttcttttctgcattcacataatatttcccctatatagtttacacaacatcatacccaccaacatatataatcttgatcatagagagataaacagaggccgctatcaagaacaagactaagaacaagacttcactaggagtacaagtatgggaagagcaccgtgttgtgacaaagcaaacgtgaagaaagggccttggtctcctgaggaagatgcaaaactcaaatcttacattgaaaatagtggcaccggaggcaattggatcgctttgcctcaaaagattggtattaataaatttatagtcactctttttcatataaatttgataattctctcttgatctatctctttttttgtgaagaagtattgataactaaagatgctttttgtttatatgattatttcttggttgttttaaggtttaaagagatgtggaaagagttgcaggctgaggtggcttaactatcttagaccaaacatcaaacatggtggcttctctgaggaagaagaaaacatcatttgtagcctttaccttacaattggtagcaggtactattcatatacgttattcatgtatatatcgttaaaatatcatgtggaaactctgaaatatagttatgtgatgatgtctataattaaaggtggtctataatcgctgctcaattgccgggacgaacagacaacgatataaaaaactattggaacacgaggctcaagaagaaactcattaacaaacaacgcaaggagcttcaagaagcttgtatggagcagcaagagatgatggtgatgatgaagagacaacaccaacaacaacaaatccaaacttcttttatgatgagacaagaccaaacaatgttcacatggccactacatcatcataatgttcaagttccagctcttttcatgaatcaaaccaactcgttttgcgaccaagaagatgttaagccagtgctcatcaagaacatggtcaagatcgaagatcaagaactggagaaaacaaaccctcatcatcatcaagattcaatgacaaacgcttttgatcatctctctttctctcaactcttgttagatcctaatcataaccacttaggatcaggcgagggtttctccatgaactctatcttgagcgccaacacaaactctccattgcttaatacaagtaatgataatcagtggttcgggaatttccaggccgaaaccgtaaacttgttctcaggagcctccacaagtacttcggcagatcaaagcactataagttgggaagacataagctctcttgtttattctgattcaaagcaatttttttaattataataatatattattcttaagatgaaacgtacatcattattattaattgggggtacgtaacgtatatatggaataacgatctagtttgtttaaatttattgatatctcatatatctggatttgaaattaactctaatatgcagaagtatgaactcatatgcgaaagatcctagcgaag

SEQ ID NO: 222 - DNA, 1576 bp, Arabidopsis thaliana
  source 1..1576: mol_type = genomic DNA
atttgacttcaccttttttccccatatgataagagtctcatctctttcctatatatatttcgtacctctctttaaggaccctacgtctctctctttctctctactctctgtttcctcataattcaatcactatatttttttaaaaacatttgacttcatcgatcggttaacaattaatcaaaaagatgggacgatcaccatgttgtgagaagaagaatggtctcaagaaaggaccatggactcctgaggaggatcaaaagctcattgattatatcaatatacatggttatggaaattggagaactcttcccaagaatgctggttagtatacgtatcttcattattacattttaatcatactttttttattcgtgaattgtctttttaaagttttgcttgaatcttgactatagggttacaaagatgtggtaagagttgtcgtctccggtggaccaactatctccgaccagatattaagcgtggaagattctcttttgaagaagaagaaaccattattcaacttcacagcatcatgggaaacaagtgagtttgaacttttcaataattttatatttttgccattacgtagtttatacgaaaactactaatcttgtagattagtcttagagtcatagctttgaatgatgttactagtgatttatgttaaatctacaatgcatcagattctaactttgtttgctttcgtataggtggtctgcgattgcggctcgtttgcctggaagaacagacaacgagatcaaaaactattggaacactcacatcagaaaaagacttctaaagatgggaatcgacccggttacacacactccacgtcttgatcttctcgatatctcctccattctcagctcatctatctacaactcttcgcatcatcatcatcatcatcatcaacaacatatgaacatgtcgaggctcatgatgagtgatggtaatcatcaaccattggttaaccccgagatactcaaactcgcaacctctctcttttcaaaccaaaaccaccccaacaacacacacgagaacaacacggttaaccaaaccgaagtaaaccaataccaaaccggttacaacatgcctggtaatgaagaattacaatcttggttccctatcatggatcaattcacgaatttccaagacctcatgccaatgaagacgacggtccaaaattcattgtcatacgatgatgattgttcgaagtccaattttgtattagaaccttattactccgactttgcttcagtcttgaccacaccttcttcaagcccgactccgttaaactcaagttcctcaacttacatcaatagtagcacttgcagcaccgaggatgaaaaagagagttattacagtgataatatcactaattattcgtttgatgttaatggttttctccaattccaataaacaaaacgccattggaatagagttatgtaaacatgcaatcattgtatttgttatatagattttgttacatatccaaaatccaaaatactatagttttaaaatatttattactaaagtatattcgtcaaggggaaagcaacatcccaccagtaaacaa

SEQ ID NO: 223 - DNA, 1351 bp, Arabidopsis thaliana
  source 1..1351: mol_type = genomic DNA
ctccacatagtcacatgtacatataccaaacttagtcaaagtctcctcctttttatataacccacaaattgatctcttctctcttctcttacaccatcttcttcattcaccatgggaagatctccttgttgtgaaaaagctcacacaaacaaaggagcttggactaaagaagaagatcaacgtctcgtagattatatccgtaatcacggtgaaggttgttggcgttctcttcctaaatccgctggattgttgcgttgtggtaaaagttgtagattgagatggattaattaccttcgtcctgatcttaaacgtggtaattttactgatgatgaagatcaaatcatcatcaaactccatagcttactcggtaacaagtacgataactttttcctctctttctcttcttctaaaaaaacagagtgaaaatagaaaaacagagtcacttttttttttctccctactcttgtttctaggaaaaagatttcaactttctaggaaacagagagaaaatagaaactgggtcactttgttttcctgctctttcttcttctttgatctttcccaggaaaaaagtttcaactttctaggaaacagagtcgttcacttttttgtttcctctgtttttgttaaagctttcctctgttattgttattcatatgaatttgaaatgttttgttttgcagatggtcattgatagctggaagattaccaggaagaacagataacgaaataaagaattattggaacactcatattaagaggaagcttcttagtcacggtattgatccacaaactcatcgtcagattaacgaatccaaaacggtgtcgtctcaagttgttgttcctattcaaaacgatgccgttgagtattctttttccaatttagccgttaaaccgaagacggaaaattcctccgataacggagcttcgactagcggcacgacgacggacgaggatctccggcagaatggggagtgttattatagtgataattcaggacatataaagctgaatttggatttaactcttgggtttggatcctggtcgggtcggatagtcggagtcgggtcatcggctgattctaaaccgtggtgcgacccggtgatggaggcgcgtttgtcactgttgtaataatttgtcaaaaaaatcccaaaaaatgggttttgttacttcatttttttttttgcttgagtccttttggataaatatagaaattctttacttcagtttctttggtatttttgttttagtttttgttcatattaccttttgaagaaaaagaaaaaaaacgatacatggtttccaaaataattttatggaaatatataagaatattacaccattgtctagg

SEQ ID NO: 224 - DNA, 1834 bp, Arabidopsis thaliana
  source 1..1834: mol_type = genomic DNA
tttgattgtataaattagactgctcgtagatatttatccaaaatattgttattaaatgggcaataatagaatggtgattacaatgtgtttctttacacaacaaccaaaccaaataagaacaaattacaaataagaattcctttacaagaaaatatacaaactttaaatcaatatttaataacaaacaaaattaagagtattaatcgaatatctttgtgtatgtattgtctttaaaactatgagtatacgacccgaacaaaatccagttctaccatgggacaggtgacgatgtgggtgacgttaagctgcagattagataaaacaattctgttaataaaccataaatataaatcatatactatgttaatcaatgcggagatagatcttactctaagaaacttttccagcaagaatcacttgtttcatcatcaagaaacttctcccagtcctctaggaaatctgaaccggatgagtgttgagctgtactgggatggttcaaactggttgtctcgggagagaccgataccgaaccagtagatggggtttctagtagttgatcaccatagtaacacggcatcataccggttctgatatgatcatttaccttggtggtcgtactggtacccggttttgctgtatttaaactctcttgagaaaccgtaaccaaaccaggaagctggttatcttcaaaaccatcccaaacattttcataagatggaatgaaatccgaggcggcctcaggagtgattccactttggtttatgaaaagaccagccgggggatccggtttaggattcactgaattggtattgaagctattgactaccggttctggtttaggattcagtaaattggtcttgaagctactgatgtttggtatggctttgggggttatgatttgaagcattttatggatcaattggagtttaagaatatcttccaaagcggtgttattgttgaggaggttattgttaccaaattggccattgttgattgctgccgcgagcatttgagaaacatcgaggatagggctaagatcgttggttcttggctcgtgcgtcactggatcaatccccatttgcaataacttcttcctcatatgagtgttccaatagtttttaatttcattatctgttcttcctggaagatgacccgcaattttcgaccatctgtatggtaaaaattcgactcaaacgttagtaaaatgaaccaacgaaaacttaaccttttgtatggttagagaattataaactaaagtttagactatagtcttgaggatgtgaattctataatagcaataataaactatgcaatggtatccatacgtaaatttgtttttgcactttatattaattttaaaagaactgaaaatggtttatattttaaaattatgaaaaaaacatgtaaacaggaacacataattacgtctgaaacaagcgagacctaaatcatttagtgctaacaaaatagcataaaagctttaacgaaaaaaaaatagtcttacttgttgccaaggagggcatggagtctaacgatagtactctcttctccatcggaaaatttgcctctccggatatcaggccggagataattcatccaccggagccgacagctcttgccacagcggttaagtccagcgagcttaggaagcgaccgccaattcccataaccattctcgtttatataagcagtgagcttatcatcttcttctggcagccacggtcctttcttcacgcctttgtcttgatcgcaacacggtgatcttcccattttgtttatatcaagaaccaaaacttatcagaggtttttgaagatatgatcttcgtttcgtcgc

SEQ ID NO: 225 - DNA, 1571 bp, Arabidopsis thaliana
  source 1..1571: mol_type = genomic DNA
caaatattaatatttaaatataaagtgtatatcaataatggaaactccataattttaaaaatggtattagctataaactctagagaaatataacaaattaacaacaaaacgaaaacagtattttacaagtaaacaaatcggaaaaacaaaaaaaaaagtcttaagattacaacaaagaataaaaagaaaactgtatcccactcgagttttattttgtttcttggaattatataataaaaccattaacgtccaagaaatcgggaatatcaaacttcatgagattactgcaatagctttctatttcatcctcagtgctgcaactgctactattgatgtaactcgagtttaacgtagtcgggctcgggctcgaggatggcgtgtttaagaccgaatttgcgaagttgaagctctgatccgaataagaaggatccaagacaaaatttgaacttgaataatcgttgaatgacggattatagcaatcttggactgacgtagtagaagttgaaacaagattttgttctccaaaaccattgaagtgatgatccatgttgttaaactgacgagcttcattggggaatggtggcatggaagattggagttcttgagtaatcgtgttctcgaaatattggttggtttggtattggtttactccggtttggctataaactgtttgcttctcttgagttctcgagtcatgatccaccacaaggttttggttttgattttgagagaagagagaggtagcgagcttgagtatctcggggttaaccaatggatgttgctggtgatgacgacgattagtatccatcatgagtcttgacatgttcatgtgatgtgaagatgaattgtatagagatgaagctaagatggatgagatatcgaggagatcgagtcgtggactgtgagtcactggatcaatccccattctaagtagcttctttcttatatgagtgttccaaaagttcttgatctcattatctgttcttcctggtaaacgcgccgcaatcgcagaccacctataacaagataaaccaaacacgtaagaatcttgaactattttcatagtagatattgtcggaggagaaaaaaaaagcaaacttacttgtttcctaagaagctatgaagctgaataatggtttcttcttcctcaaaagagaaccttcctcgctttatatctggtcggagataattagtccaccttaacctacaacttttgccacatctttgcaaacctgatgaagagaaaaaaacatattacaatttgaaactttcgaaaaacataactaaaacatgaataataaatgaaaattaagacacgtaccggcatttttggggagggttctccagttaccataaccatgtttctggatatagtcaacaagcttctggtcttcttcagatgtccaaggccctttcttgagtccgttcttctcgcaacaaggtgaccttgccattgattgtttatcagaaaaaaatggtcaactggtttagtatttatgagctaatcagagagtttgaggaaaactatagtattaatagagaagagagaaacaaaaggtcgtagggtccgt

SEQ ID NO: 226 - DNA, 1681 bp, Arabidopsis thaliana
  source 1..1681: mol_type = genomic DNA
tattaaatttgttgtcatgattattaaaaaaatgtcatagctttatcaaaagactatgatgccatatatgtcaagcttctcacttattgtaccaaaacgaaaggccaccatacactactcattcaaatccatcccaccaactcacatctagaagcaattataagttcaactctctttctctctccttttctatcatctagaagcatttgtgtatatatatatatgtgtgtatattcctctctagctttaagtcaaaaccctatataaactatacaccaaagctttgaaccttcaaccaaacccaaaatccaagtgccccaccaaatgcttcaatcctcttccactacacaaaaaaacaacttaatccctttatacccttttagccaaaaccctcgctaaaagccaatccctcaatataaaataacaagtagaattgatctgcctatatataagattttgagacgaaataagatctaaaccacaagaaagaaagtaaacataaaagtatgggaaggtcaccgtgctgtgagaaagctcacacaaacaaaggagcatggacgaaagaagaggacgagaggctcgtcgcctacattaaagctcatggagaaggctgctggagatctctccccaaagccgccggacttcttcgctgtggcaagagctgccgtctccggtggatcaactatctccggcctgaccttaagcgtggaaacttcaccgaggaagaagacgaactcatcatcaagctccatagccttcttggcaacaagtgagtactatactctctaaatatgggcttatttaactagctagtatcgtttatacccaaaaaaaaacaaaaaaaactagtatcgttttaatttatacaaaatgaaaatcttggagttttcaatctatctaaatgatgttattttttgttgatgatatatagatggtcgcttattgccgggagattaccgggaagaacagataacgagataaagaactattggaacacgcatatacgaagaaagcttataaacagagggattgatccaacgagtcatagaccaatccaagaatcatcagcttctcaagattctaaacctacacaactagaaccagttacgagtaataccattaatatctcattcacttctgctccaaaggtcgaaacgttccatgaaagtataagctttccgggaaaatcagagaaaatctcaatgcttacgttcaaagaagaaaaagatgagtgcccagttcaagaaaagttcccagatttgaatcttgagctcagaatcagtcttcctgatgatgttgatcgtcttcaagggcatggaaagtcaacaacgccacgttgtttcaagtgcagcttagggatgataaacggcatggagtgcagatgcggaagaatgagatgcgatgtagtcggaggtagcagcaaggggagtgacatgagcaatggatttgattttttagggttggcaaagaaagagaccacttctcttttgggctttcgaagcttggagatgaaataatattgtcaaattttaggcgtaactgtacaaaacttttgcctagataatttgaaagtatatcttcaacttgtatgagaaatttaactggtgaattataatatatagaatttgtttttttttctcttttacaaattaactccattggcataaatattaaataccgg

SEQ ID NO: 227 - DNA, 1709 bp, Arabidopsis thaliana
  source 1..1709: mol_type = genomic DNA
ggaaagaagcacgtggtgaatggacatgaagagaaaaggatgctaggtttaatataaattggaataagaagcagttagtggttgtgaaggaaggaaggaggcaagcaaccaaatctcagagacaattataacagtatagagaaggaagaaagaaaagaaaaagaaaccgttgttgatttagatacagagaagagaagatcatctaacatgggaagatctcctatctctgatgactctggtctcaagaaaggtccttggactcctgatgaagatgagaaacttgtcaactatgttcaaaaacatggtcatagtagctggagagcccttcccaaactcgctggtaatgcttttgtgttctttctttcttgaaagcttgtcttaagtctaagcttctcatgtgattctctctgtgcaggtcttaacaggtgtgggaagagttgcaggctaagatggacgaactacttgagaccagacatcaagagagggagattctctccggacgaggaacagactatcttgaatcttcattcagttcttggaaacaagtaattaatcttgtgatgattgttttgatgttttagtcaacggttttgtttgtgtaccagattatcttatactgattgcttatgaatgatgatgttataaggtggtcaacgattgcgaatcagttaccagggagaacagataacgagatcaagaatttctggaacactcatttgaagaagaagctgattcagatgggttttgatccaatgactcaccgtccaagaaccgatatcttctccggcttatctcagctcatgtctttgtcttctaacctgagaggctttgttgatctgcaacaacagtttcctattgatcaagaacacactatactcaaactccaaaccgagatggccaaactccaattgttccaataccttcttcaaccgtcttccatgagtaacaatgttaaccctaatgactttgacactctcagtctccttaactctattgcctctttcaaagagaccagtaataataccaccagcaacaatctcgacctcggtttcctcggctcttatcttcaggacttccacagcttaccttccctgaaaaccctaaattccaacatggaaccatcatctgttttcccccagaatcttgatgacaatcacttcaaattctccactcaaagagaaaacctacccgtgtctccaatctggctctcggatccatccagcacaactcctgctcatgtgaatgatgatctgatttttaaccaatacggtattgaagatgtcaatagcaatatcacatcttcaagcggtcaagaatcaggagcttcagcttcagctgcatggcctgatcatctattggatgattctatattttccgacattccttagccttcttttgtctttactttcaggtatgtactttggaggaactcaaatcaaatttactcttggaattgtgcttgttggagatttttatttgcctatctatatatatataaatactgtagagacatcatatatttgtaactcatgttgtagaatgtacagtacagagatttcatactcatatgcatatgttgttgtcaatgttctttagcatatgtctctgtgcacagagtttatatatatataagatttttgtgaaatggatatcatttgtagttgtagttgtagttgtatggtatttaataattagggtttttgctgatt

SEQ ID NO: 228 - DNA, 2437 bp, Arabidopsis thaliana
  source 1..2437: mol_type = genomic DNA
caaatattatgataagtttccacaagggcattttcgtcattctgtggtcagcaaagtcaaaagctaaactaagatcttctccgtccgacaagatacaaagacacgaaacacaaatgccctatttaatgcaaagatcacacacacacttagcctcattcactaagatccttaattggattgccttcatcagaatctttctcccttgagagttctaggagatcttcaacaggttcgacaatacatttatatacacacatgcaaatatttatgcacgtatgtttctgctcatacacacgttaacaagttcatttataatcatgaatctaattatggatcaaaagtgtgtttgatttatacattatctttagattgatgaacttttttttggtcaaagattgaagcaattctatatgcttaattctctaggttatttttattttttcaataatactttctacgtacataacaatattcgtgttatagctagtaataatggggcgatcaccatgttgcgatgagaatggtctaaagaaagggccatggacacaagaggaggatgataaactgatagatcacattcaaaaacatggccatggcagctggagagctcttccaaagcaagccggtttaaaccgatgcggaaagagttgtagattaagatggaccaactacttgagacctgacatcaagagaggaaatttcactgaagaggaagaacaaactattatcaacctccattcccttcttggaaacaagtaatcaattactttttcactttataattccttgctttgttttaaaaaccatcgaatgttaattctttctagtcaaatcattaattatatctcataaaaagttagtgtgaaacgatctaggatgaagtttataactagaattaagagtagtgtgatatatgaaatatataataacatatatattagtatatagtttatggatgaaagaatataattgacatatatacctactacactggttttctctaggtgcatacgtctgtagccgtttttcaatcttgaaaagtaaatcttgttacgactaaagcaagacaatattaggtatatattagtcttagactaatccactgccataatatcaatttgattaatgtttaattatttcgtatatgttttggaaggtggtcgtcgatagccggtaatcttcctggaagaacggacaatgaaataaaaaactattggaacacacatttgagaaagaaacttctccaaatggggattgatccggtgacccataggccaagaaccgaccatctaaacgttttagcagctctcccgcagcttatagccgccgcaaatttcaacagcctcttgaatctcaaccaaaatgtgcaactggatgcaacaactcttgctaaagctcaactgctacacactatgattcaagtccttagcaccaataacaacaccaccaatccttctttttcttcatcaactatgcaaaacagtaacaccaatctctttggccaagcttcttacttagagaaccaaaatctttttggtcagtctcaaaacttctctcacattcttgaggatgagaatttgatggtcaaaacccaaattattgataaccctttggactctttttcttcccccatacaacccggttttcaagatgatcataattcactccctctattggttccggcgtctcctgaagaatctaaagaaactcaaaggatgatcaagaacaaagacatcgtcgattaccatcatcatgatgcttcaaacccttcatcatcaaactcaacgtttacacaagatcatcatcacccatggtgtgacactattgatgatggagcaagtgattctttttggaaagagataatagagtaagtcctatcagtactctcccacatagattgaattttatagttaccacatgaatgcattcagtgaatatggacgatttggctagtctaatgttataattctccgttttgcaggcaaacttgttcggaaccatggccatttcctgaatagacaagattgaaaaatgattaaagagagagtatatttatttttcttgttatttgttgtcgatagagttaaaagcatatttattcttcactaatccttaccgtgttttttttgtaagaccatgtgtgtgtggtaaacattgatcttgtacaaacttgattacattactgtattaatacaaatattcgtgtttgtaattactttcataaatctaatttatctgctttacaaaaaaaatacaaacgttgatttctttttgttttcaaatatataaagtacaaagacgaacgcaaatatattcttccatttgatttcttattaaattaaaaagtaaatatactatctacacgtaaacgcatacgccaatgcaataaaaacaatttgtctcctattaattataatctagtcaacacgtaaaaaac

SEQ ID NO: 229 - DNA, 1866 bp, Arabidopsis thaliana
  source 1..1866: mol_type = genomic DNA
ctaatatcctctttttctcgtctttatatatcatctcatccaagcattagatcatttcatcatcacaccaaacataattaacacttggaagagaacaacaacgacaagatcaagaaaagacaaagatttgtaagaaaatgggaagagctccatgctgcgacaaggcaaacgtgaagaaaggaccatggtcaccggaagaagatgtgaagctcaaggattacatcgacaaatatggcactggtggcaactggatcgcactgcctcagaaaattggtaagaattctgaaatgtttaaattctaatcccaaaagtaatcgcttataattttcaatttcgattgattagatcaagttttgttctgactttgagatttgtgtaaattatagggctgaagagatgtggtaagagttgcagactgagatggcttaattacttaagaccaaacatcaaacatggtggtttttctgaggaagaagatagaatcatcttgagtctctacattagcattggaagccggtcggtgatctatctctcttgatttctattaataataagttaattaacacctcttcattaaatatataaatttttttgttatgatttagaggtaatttctgttgaaatttcgacttgagattcttgtctttttaccttttgtctatgaatcttatgctgaaacacatgcaagcccatgtttcttcaagctatggtatctcacatagaatttagggtttatattgtctctttcttcttgttttggtgtctttgtaagaacctttatacatttatatcttttaatcttgaacttggttcgtgattctaaatacatagttttctaaaaaaaactttctattagttttaaccttaatgtgatatatttatgcaggtggtccataattgcagctcagcttcctggaaggactgacaatgatatcaagaattattggaacacaaaactgaagaagaaacttctaggaagacagaaacaaatgaatcgtcaagactccataaccgattctactgagaacaacctcagcaacaataacaacaataagagtcctcagaatctgagcaattcggcactggagaggctccagcttcacatgcagcttcagaatctacagagccctttctctagtttctacaacaaccctatcttgtggcccaagcttcatccattgctccagagcactacaactaatcaaaaccctaagcttgcatctcaagaaagcttccaccctttaggagttaacgttgatcatcagcacaacaataccaagctagctcagataaacaatggagcctcttctctctattcggagaacgtagagcaatcccaaaaccctgctcatgaatttcaacctaatttcggtttttcacaggaccttcgattagataatcataacatggactttatgaacagaggggtttctaaagaactgtttcaagtgggcaacgagtttgagctaacgaacggttcgagttggtggtcagaggaagtggaactagagaggaaaacgacgtcgtcgagttcttgggggtcagcttctgtgcttgatcagacaactgagggaatggttatgcttcaagattacgctcagatgagctaccacagtgtttaataagttatatcatgcatatatataaatgcgtaactatagggatggataatggattattgatggaatatgtattttattacggtcataagcttatagcatgttgatggtgaaaggggctttttcataatttgttttaaaatgtaacgagttgtggataataatgtaaatcgttaattctacttggttttatttcattttggaaaaaataggagacgtaaataaactttgatcgatttttatggtg

SEQ ID NO: 230 - DNA, 1541 bp, Arabidopsis thaliana
  source 1..1541: mol_type = genomic DNA
gtgaatggacattgaagagagagagggaagctcgacttaatataaatatagaaataagaagcagttagtggttgtgaagaaaggaggcaagcgaccaaatatttgaagaagtaatagtaaagagaagaggtaaaaaacaagaagagagaccgttgttagatacagaagttgatcaaacatgggaagatctcctagctcagatgaaactggtctgaagaaaggtccatggttgcctgaagaagatgataaactgatcaattatattcacaaacatggccatagcagctggagtgcccttcccaagctcgctggtactatcttgaagacgttgatgaaacctagttttgtttgtgatatgagtctaaagtcttagtcttatgaatatatctctgtttctctatatatgcaggtcttaacaggtgtgggaagagttgcaggctacgatggacaaactatttgagaccagacattaagcgaggaaaattctctgcggaggaagaagagaccatcctgaaccttcatgcggttctaggcaacaagtaagaacccttctgattcttgatattatctgggattttttttgctttgtaacttatcctaaatgttactggtgatgatttatataaggtggtcaatgattgcaagccacttacctggacgaactgacaatgagatcaagaatttctggaatactcatttgaagaaaaagctgattcagatgggttttgaccccatgacccatcagccaagaaccgatgatatcttctcaagtttatctcagctcatgtctctgtctaacctaagaggacttgttgatctgcagcaacagtttccaatggaagaccaagcgctacttaatctccaaactgagatggctaagctccaattgttccaataccttcttcaaccttctcctgctcccatgagtatcaacaacattaaccctaacattctcaatctcctcatcaaagaaaactccgttaccagtaatatcgacctcggtttcctctcctctcatcttcaagacttcaacaacaacaacctcccttccctcaaaaccctagacgataatcacttcagtcaaaacacttctccaatatggctccatgaaccaccgagcttgaaccaaactatgttgcctacgcatgatccttgtgctcagagtgtagatggtttcggcagcaaccaagcctcctcaagccatgatcaagaagtagcagtcacagactctgtagattggcctgatcatcatctatttgatgattccatgtttccagacatttcttatcaatcttaaggtatgtatgtatgtatatgtttcacaagaagttgactggatttgtttggtgtcgctctgcatgtggttctatatctatatacgatgattcatgatgtgtgataatgtcttagaatgtagtacatgtgttcttatgtatttctcatacatgttatttgtgttcttatagaacattttatatgtttgaatgtatcttcattaccttagtatgtagagagaccaatcaacgattgttcagataatc

SEQ ID NO: 231 - DNA, 1793 bp, Arabidopsis thaliana
  source 1..1793: mol_type = genomic DNA
tccagctattatatactctctctctctctcctttattttttctcaattcacatataattttcacctttacacacatttccatgtaagtatatataaacctcacacacgcattatcatacaccatcctcctcattctcttcatcatcaacataagagagagagaagaaaaaaagaattacaattaataagaacaagatcaagaatcaagaatcaagaaaatgggaagagcaccgtgttgtgataaggccaacgtgaagaaagggccttggtctcctgaggaagacgccaaactcaaagattacatcgagaatagtggcacaggaggcaactggattgctttgcctcagaaaattggtatgtattacttaaaactcacttttgatttaaaattggcactgagagtttccaaatagtactttgagaccgtggtcgtgttaaatttgtgtgttgatgatatttatttacatggtataggtttaaggagatgtgggaagagttgcaggctaaggtggctcaactatttgagaccaaacatcaaacatggtggcttctccgaggaagaagacaacatcatttgtaacctctatgttactattggtagcaggtactatatacttacatatatatcatcatatgcatggatgaatattattaattgacacacttattcttgacttagagactcactatgtatctttgtttaattctaggtggtctataattgctgcacaattgccgggaagaaccgacaacgatatcaaaaactattggaacacgaggctgaagaagaagcttctgaacaaacaaaggaaagagttccaagaagcgcgaatgaagcaagagatggtgatgatgaaaaggcaacaacaaggacaaggacaaggtcaaagtaatggtagtacggatctttatcttaacaacatgtttggatcatcaccatggccattactaccacaacttcctcctccacatcatcaaatacctcttggaatgatggaaccaacaagctgtaactactaccaaacgacaccgtcttgtaacctagaacaaaagccattgatcacactcaagaacatggtcaagattgaagaagaacaggaaaggacaaaccctgatcatcatcatcaagattctgtcacaaacccttttgatttctctttctctcagcttttgttagatcccaattactatctgggatcaggagggggaggagaaggagattttgctatcatgagcagcagcacaaactcaccattaccaaacacaagtagtgatcaacatccaagtcaacagcaagagattcttcaatggtttgggagcagtaactttcagacagaagcaatcaacgatatgttcataaacaacaacaacaacatagtgaatcttgagaccatcgagaacacaaaagtctatggagacgcctcagtagccggagccgctgtccgagcagctttgggcggagggacaacgagtacatcggcggatcaaagtacaataagttgggaggatataacttctctagttaattccgaagatgcaagttacttcaatgcgccaaatcatgtgtaacattttgtttaaaactttatttgtacttaaatacataaagaggggttttctattttgtataaatctgtgtctttagggagtggtagaaaagttttatggattgagattagtattcatgcagaaatttgtttattttagtttcaacttagctttattcgaacaacttatatgatattttttcgagtttttccttcattgttcttgcttttataaatgtgaagaga

SEQ ID NO: 232 - DNA, 1497 bp, Arabidopsis thaliana
  source 1..1497: mol_type = genomic DNA
catgaaaattttatagactaataacttaatatcttttgagagaataaaaacaagaaatttatacatcaaacaaaagaaagaatgcaacaaagaatcatatgtgtgaaagcaagacatgtgtatgcaaatgttgaaaattaaaacataaagtcatctaagatgaaatcttccggaattccaaagtcgaagaaagtgctggagttggtttctgcttcaatgctattttgtcgtggagaagacattggcgttgacatgagcgagtctaagtcaaaactctctgacaaaggtggtaatacatctgcaagaccaacgtcgtcgagtcttgcgttcataggctccaatgatgaagtttcatagtttgttgggactgtactagtctcagcttgtggttgagacgattctgatgatgtatttggagtttgaagattttggtcgaggttcgatgggtaaactggattagggttttgaagtggcagtagtagagaggccaacctcaatacatcaggattaagaagagaagacgcatgtgttgcaactgctgaaaagtttggctggttgaaaagtgcactcaaaagtgaggacaaatcaagaagatcaaggcgtggagaatgagtaacagggtcgataccactccttacaagtctcttgcggatgtgagtgttccaatggttttttatttcgttatcggtcctccctggtagacgagcggctattgctgaccacctaatattcatcaattcaatattagtgacattaatctatgatcaatacaaaactcctttattattattctaatataggtcaatacgtactagtaaagtactaataatagtttattggagttgatggcctacatttgacatgtacccccgcatgcaaacgtacactctccctttttgagttttacattaattaacatacaaaagcatgtagctgatgaatatgaatttcagacaaaaattatggtgtgaatgatcaggcttacttgtttcccataacactgtgtagctgaatgatagtttcttcttcctcgaacgagaatcttcctctcttgatgtccggtcttagataattggtccatcgaagacggcagctttttccacatctatggagtcctttaatttgtacaatacgacttataagtgtgtgactcaataaatagagaacatatatattaatctatgagaacaaaatataaggaacggtgtgtagtttatacgtaccagcatttttggggagcgtacgccaattgccaggaccatgaaatcgaatataatcgatgagtttctgatcctcctcagcagtccatggtcccttcttcactccatttttatcacaacaaggtgatcttcccatctttgttttgtttcgcacaactttaaatttcgataatgatttggttctgttatttagatagaaaaaatcgaagagccaagtggagtttcttaattttcaaaaagaggagttggattttagaaatgtcaatgtgtggatgta

SEQ ID NO: 233 - DNA, 2000 bp, Arabidopsis thaliana
  source 1..2000: mol_type = genomic DNA
tttaaatggcttttaattagatatatttagcgagaatgtgattgctagtgaaatctcaaacttgatagcttattcatagcttattttacttcgatcagcaagagaacaatggttcctaaagctcaaaccttttttggcgtttgctttagattgtgcatacataaagtgagaagatgaaatatggttttgctgaaatctcaatgtgctcattcatagtttattttgctcgacctttctttaatcaatagctttgatgtactgattactttataaagttaagaagtaagttctgctctttaaactgtactgaatggaggcttctctgcataattaagcaaacactctgatgattgagtttcgttgtacaaaggaaagtttttgccttagttagaaattcatcttgtttctttgcccagaagctggcttgctgatagaatttggactacgctacgttttcttgggtgaaaaacaatccgcgtccttccacgagaacagtgaaactgtacgatgttcttattgtattgtgtcaacagcccataatcaatgaaatgggcctcaatgacagtataagccgaaaaatattcgaatgcgatctagaactaatctgaaaccaaacttctcaaatcattaacatttgattagggcctaaaagtccatccgtattttaaaaaaaagttgataacaaatgcaaaaatacaaatatacattactattaaaactcaatctttctgattatatgtggatggagaagctgttttgcagtgtggatttgaattttgaagttcttgttcaaaaaagaaaagaaacttggtcaagcttcaaaagaaagaaagaaataaagacaagtatacaaatacgttgacttcaattaatatgaagatagaagagaaagatatagaaatgcgttttaaattggcggtgggagatatgtgattcccttggtcccgctttctcgtttgattcggtaacctaaaccttctccatccaagaagacacaaacaaggaagaaattaacctacgtacgtacatcatttgaactacttatatctattataaatggaaaatctattttcttcttctctctcttttaaccgaaaaaggaaaagtcctcgaaataactctttaatataattcatgtggaaaccttctatatattttttgcatgcttttttgaaattaagtaatggcatactaattagaagaagacgaaaaataatatgtctaagtaattgagtttcgtggtcaaggcaaatcaagattgcattctttaattaagtgtacaaattatgatgtaagaaccgttatttggcataacctaatatatattaaaaactgattttttttttttttaacttctgtaagaaatggttttcttaattaccaatcatgatctattattgtaaaatgtgtaattttgtgttgcgattgaagtgttcttagataaagatatgtcatatgcatgatatcatctatttgattttgagaaaataaaaacataacatgagaacatcgtagagagtaagatacatgacaaagagaaagaataagctaagaagtcatccaaaaattgggaggcctactctcaactaccaaaaatacaagtgtttgttgtgttaggtcatttattcagtcacctaaccctaactatatgaaatacgttaaaattcatatatagaaaaataaagaagaaatactattagtcaatataattttttttaacaaaataaaaataaagaaagaaacactattagtcaatgaattaaaaaaaaaaaaatccatctttcgatcaagaccgtccaagtattctcctttcacataactcttacgttttacactaaacaagacgagatttttatgagcttgtggctcccacaacaatcctcattgatttctccatatatatcacatgagaatccaactcgacttcatactaacattcatcccaaaagttccattctttttcacaaagccattgtgctgttttctccatttggatcaaa

SEQ ID NO: 234 - DNA, 2000 bp, Arabidopsis thaliana
  source 1..2000: mol_type = genomic DNA
aagtccaaatacaatgtaatggtttaaaaaacttgaatagatgttctcatacactttttttttcttaataacaggcaacactatcagatattctgcagaagctaagtatgttattggattttgcttttattatctatttcgcaattcaaatgtacaaggagctttttggtaacatatgctgtttgtgataacgtcaggtgaccattttggtgtcgagctgtcgcatagaaaaccagaggtgaaggatgttatcacagaggccataaatgcaatgactgatgatgaagaagaagatgaagaggaagaagctgaggcaggaagtgacaaagaaaaggaagaagtaaaaggagaggaagaagaggaaaaagctgaggctgaaagtgacaaagagaaggaaaaagaagagccaaaggattgaggttaagagtttcgttttccttcgttcaaaatctaatgtgaaggaaagcaaaactgacacaacttttgtgtgaaccagagcaagtgaaagtgtgtcgaatctgtacttttgtactgtgtaatctctatagtctgactctcattatgtagttttaagtgtcttttacttgtgtagctgttacctgttacctgttaggttttctaatccttgttttatttgatagccagatactttagggaattttacttcttcttttcttgggtttaatttaagacatattcgtatatttcatttaattctgttatctgatttgtgagatcatgaaaacgaatgttgaacttgaaacttgagtgggttcagaaaaactactctgtattaaaaatcccagtgtcacatgataatgatccttcagtaaaggtagacatagcttttttgcagtgtgatatgcacaaatacaatctatatttttatgtaaaagatatatttctttgaaagtacttataaaaatatgtttttcataaaaaaaattatatgtaattctgaaagtatgtgatatgcacaagcacaacctatatttcctacattcaaattcgggtttttcttgacgccaagttacattcaattatcaataatagggctagttcaactaatgctatttatttatacaatccacccactactaaatctcaatctccaaggatctttatatattaataagaaaagctactatccaaatgcgaccttgttcgtgaagtgtttggtttataatttggtggcttaagactatagcccaccattgacccaaaaaaagaaaggaaaattaatagtagactatatagctaccaactccctataatttaccttgaaattaaaccagctttgtatttttttaatagaagtcagggctctacagtttcattttaaacttttttttttgttatattacatcctgcaggttagttgtaatttgtaaacgtaatcaacataataaaaccatttacatagactgattaaagttgattccatttgataatatttagctatttatatatcaatcaaccaccagctcttaaatatatgtattcaaattgttttgttgactctttttgctacactttaaatttgaatctagaatgttgtcctgaaacaaaaatctgtggattgaacaaaattatacaccaggtaaaattttgaagtttttaaaagcaggatcacatactcctaattttagattggatagatctagtataaaaatatgaagtttttttcccaaaaaataataataccatttagctcttaattaaatgcatgcaaactaaagataaaaagaggaattattttaaccattctaactcgtcacaacatgcctaatcattccaggttaattttagagttttcaaatcgtcatattaacatgtgatcctgaagactcttctcttctttcttctaccattagctgaaatctttacttgtaccacaattaacctcaaaccctagcccctaaatccccctagaaatcaatccatcctcagttctccaaaaagatatctttggtttttcttcactgacaaaacccctaaaa

SEQ ID NO: 235 - DNA, 2000 bp, Arabidopsis thaliana
  source 1..2000: mol_type = genomic DNA
acactcggcccttgaaacctgacccctgtgagcgtccggtcacttatttcatggatggtgccgaggatgtacgggatagtgggacgaaaacttggtatagcataggggataagaactatggtcattgcggaaagattgagcatactcgattaactaaagtgaagaggatattggtgacttcaatgaagacggatcctgagtattggaacaaggtacttagtgtttgtatatttctcatattgaatttaacattttgggtgagtttaggttacatctttttttttattttttgcttttgttgataggcaccgaggagacagtgttgtgaggtgatggaaggaaaagtaggaaaaagaaaagagaaagaaatgttgttaaggattagaaaatgcagatctttggagaagatataaaaaaagcgttttaattagagagatttttgcacatacagatttagattcgatcattagttatttgtttctaaattcctcaattcctagtaccaagagaatgacgattttctctagtaatactggcactcttcgtttttcaacatgtaaacattactttgtataattagtctatatcaaataaatagttacaacatgaacgtaactatttatacacgagggtaaatttttaacaaatttaaaccgaaccaaaaagatttcagttaatcatagttttgttacaagcgaaatctgaaatattcaccctcaagtttgttacgtaattgtctaatctgtgtttttttgtgctagtgttataattgtttcctcgaatgttaagcaccacatagaagtatacacttttcttttattattttcgttcttcttccatttagaaacttttattaattctactgttaaatccaacgttattagtttattttctctgatgaagttctaattttttttgtttgttggaaaaagggttacttttctgatgaagttgccgatttgtttccaaccaaacctcagctaatatagttagggagacggataagaaattgcataaagggagaggctttgtaaacacgcaagtttacgtcaacttgacacatataaactcgtatataggaattgtgtaaaatgttaatcaatatatgtttatgaatatagtccttttatttccttaatctatagtcatgttatcatcatatcggcaagaaaattactattacaacatatgtttccgtgcttcgatttgtcgatcaggtaggcaaccaaaccgggccagattagtcacaaatgaaattaggctccactttggcaagttttttcacaattaaaaattagaaagtctaaccaaactaatagaaactgaaccaaacaaaaatgttcacgcaattacgtagcacttctctatgaaatactgtggataattcgatttgagctaatctatggtaagtcgtttctctcaaactgaattaagctaaaccaaaccgaaaataaaccgttgtagaacacccataataaacatatatatgttctctactcttatttggctatttttccatttgcagatacgtgtgacaacattccaaatataggcacatgatacaaattacaaagccagaaattataatttataaactatacataataaggtcagtagcctaattacatccatatatttagttgggcataataaggatagcctaattttggtgcatcccgccaaaaattcggacaaatggtgaatttcaaaccatgaatttctttgttatacatacattacgtgcactattacatcaaagaaaaatagtgacgtgcataaacgtattttcttcacataatctatatataatatatacagccatgtacatttttcaacatagaaaaatcatgtatacaaatacggtaggtgcaatactgataaactgccattcccattgcattagacgctagtcaatccaaaccttataacataaaaagttatagtccatttctttcatatccaatcgagtcaaaataatattcgagcaaaaaacaaaagaa

SEQ ID NO: 236 - DNA, 2000 bp, Arabidopsis thaliana
  source 1..2000: mol_type = genomic DNA
agctgcgaatcctgggcaacgatgacttagtatgtatagaagaaaaaaaaagcttttacttggtatcaaacagagcatgtgttgttgtatttgctacctttttctgcaaagttattggcaattgtattgttgttccacttgtatatatacagagaccatttatgttaatatacaacttcgtatggggaaagatgattccatcaagtccaaaatgccaaaaccatgcacgatcttgtctgatcaagtatgataagatgtgagattttaagaacgtgaagcttttcatattgtattctcaatgaacgaagaattaataattagagttagaaatgcagattacagagattacacaatttgatctcatttcttggcaaagaggcccaggccaccgaagccaccgtccttctttggattcctgtgtgttaattttcgtgtggctttagttacaaagggattatattgtcagcgaatctgagccgttggatcgttttgacatgagctttccataagtgtcttatcctttgtttctctcatttttcacatatgtatcagacatttaatcaagcacatatctacgtgttgattatgttgatgatgctgagattatgttgatttagagaatgagtattggtgatgatggtacacgttagtaaacatatgaatttggaagtgccacgtgagagggagcagagttttgggctttcttttggttatgtatttgcattcttgttgtaacaaattctcttattaaaagcattgtgaaaaaaaccaaataccacatagtctatgtttcaagatttgttttttaatactataattttctattactttagtttgtgtaatttttgaaaagagaaaattggtattttttaggattgggtgatctgaaatttgactacaaaaattttcttggacacagacacacagtcacacaaataagctaattattggaattttatcttaagttgcattcactttgcaaattaatattgaattatagactattagtgtatggcgtgatggcaaacaaaaaaatcagtgtgtgatattgtggactagccaaaaaaattttctgatgatttttttgcctaaataatttgaattgttgagaccgaaactcttactaatatactaacaatgtaacgcgacaaataaaacattgttgagaataaaatctgaaccatcataactatagtctatagtaaccgtccgaattcaaccacatatgtatgatctttgccatttttgatcatattttccgttgcgttttctttgaattttctcaatatatttttagtgttttgatttgtacttttatctaatttatataattgtttttcaaatgtttcgcaattgtgcgtttaagtattcgactcgaagtaaacccagtttcttagaatgggctaactgccattgaccaaatctttatccgcgaagaaagatctttagcagctaggcttatttcatatcaacaaaagtatatatttatctctaactaaattcctacaattatttcaaaaacatagaaattaaaatttgaaatgcctattcttttttggttatacattgcaaaggttatgtatgtaatttctgatcttgaaatttaagttctttagcccatatctagttgattttcacgaaatattgtcgtttactctcgtttttatatataaagcatgtacatataacatataatcaatgcttcaaaagaaaaaaataatcataactaaattgaaacgggaaaactaatttgctttcgtgttctattatgccaaactgtactcacaatagtcttatcctatcgacccaaatttaatcttcccaactacttactcctaattgaaacaaaatataacctttcttactatagcctatatttaaaaaatatctatgatttctacatttatatatatacgcacacggcacatacctctcattcaccatatatgcctcttaacaatctctccacagaacaaaagcaaaaagcctaaaccgggata

SEQ ID NO: 237 - DNA, 2000 bp, Arabidopsis thaliana
  source 1..2000: mol_type = genomic DNA
aaactaatctaaaaagtagtgaggatgacttgaaacttaagtcttatatgaattatctttaaatatagaaaaagaaaggagatagagaggtgtgtttttcatgtgaacaacttttttttacctttagagtacttccagaagacttattgggtccttaataaaagtagaccaaattattgaagagctaaaaaaaaatgcctactcaaaatatccaaacctcttcttttagccttttgtttttttcaatattcatactaatgtaaactacaatcattgtatcattctataatcatatgaattttttgtcaacaccatgcattatgctagtttaaatttaggtgatgatataaagatattttaagtacaaatcaataggggcgatgttcttatgtctttatctaactttatgaatttgtgttttatatattatgaaaaattggaaaagaagagatggcctacgctcaagaccaattcctaccaatgggcaatggtgttgaaatctgaacaaaaaaatttcctttctttaacgttagctttaaagttcaaaaaactttatttactttttcagtgataattctgtataaaataacatataacaatgaggaaaaaactcaataatttgaatcgcttatgactttatttctccaagtgcttgacttttaaaaccctaatgtccaatctcaactaaagtcaacctttttcgttcgtctagaagagtcagtcattaagtttcaattgaagtatacagtaaattattagtactttttattttattttaaccacagttcattggctgtatgagatttctgttcaagaaaacatataaatcgaaaccaaagcaaaagacattatttgcttcggtttcttctactcaagctcatttttagtaaaactaaattgtattttcattttcttaaaaagttaattgttttttttgtaaaatcagttttaccaaattggacacaataatgaatatatgtctatgtctagttttttttagctcagaatatatcttatgtgaatagaatcgtctatcagatatttttgtgatgcagatagaacttaccgttatagaatcatttgtagattgttcatcgtgattgttaagattagattcccatttgtaatataacagaaactcgaaaagtacttatattaagtattaacgatgtatcatgtgaccaaaatagaaaatactacgtaatgatatgattattaagcgagtgtgtaggtaattcaaatatttcaattaatcaatctttgatatcactctttagagtaatgtattatctttcttattgttttaccctgggattaataagtttaccggatccggagtagaatttcttcggtttggcaattttgttcacctaccataacgaacttttacccttatacttagtttcaatctacttttggtgcatcctttcattttcaactgcaaagaagtagttaaaagatccaatacataatatatttaatttatcataagtaacttagtgtaaagaaagactaaagtactttttaaaatatgtatttgtatttcccgatgtgaaagaaaagaaaattgaatttgcacatatcaataatattagctaggaaaaaacttgtgagaaatttctttgacgacttgcgtgtgcaatagtcttccttatcttctctaccatttcttaattccactattgtatagtatttacttatgttgaattaataaattaaaacatttaaatttccctaaagttactttttgatttttgattttctatttttattacaactttcctactttttgacatcttttcttacaaagactttttgacatctccccctccagctattatatagtctccttttttcttttctgcattcacataatatttcccctatatagtttacacaacatcatacccaccaacatatataatcttgatcatagagagataaacagaggccgctatcaagaacaagactaagaacaagacttcactaggagtacaagt

SEQ ID NO: 238 - DNA, 2000 bp, Arabidopsis thaliana
  source 1..2000: mol_type = genomic DNA
aaaaccaaccttgtatacataaagagtttgttaacgtctgcttcaaactgcagttgccttgggttcttagcaaatgtggtactcttggcaagaactccaacagcctgcaaatgcaaagtttatcaaatgagcaacttcattagaaatttatcaataaaaaacgaaactttacgattccccttcagcctaatttcaattcttctaatcttaattctattggtgcaaatcgaaaagactaaatccgaacaaaaaattcaaactttcttcacacccagtaagagatcaaacacagaagcaagagattcattaacctgctgaaatttgttgaaaagagtcgccatttttagttttctttcctctgaaacgattctccacgctctttgtttataaggattgcaagaaattactgaagaacatcaggaatcgcgagagcttggggcgaatcaaaaacctccattgatgaagaagactgcatctagtactttacttactcggtagcacacctccatgggcaggctccagcaccatggttgggcccatttcttattaatgggcctaaaatagagcttctagggcctctatatattttgtcttttctcttccgtttaggcgttttgctaactttcttacgtatatgaatgtgaattatagttagttaactttagaactgttgagcggccaatgccacgtcctttgtacgtaaattatgttattcatgctattatttatgtaccaattttctattctaatatatattctaagttttttttgtatcaatactaagtatttatacaatttttgcaaattttgacagaaagatagtacaaaaaatatgaaagaccaaaaactacataaaccaccaaaaattacaacacaaacagaaaacggaaagaaaactcaatcgaaaactctacaagtagagaccttaaaagaaacttagattccaaaccacaaagctcaaatatttgtgtggtttcctcaacttaaaagatctcaaatacttatagttgttgccactagcaatccaaacctaggccagttttcaaaatctctaaaaaagagcttaccattccaaacttaggacaatcctcataatattttaaattttatgacattttttagttttttcttaccgaacatagagatacaacgaataacacaaaataccaaattttactaaacaaacaattactgcacaaatgaaaaagtaatcaacaacatgagctcatttcacgaaaaaagaagcgaaaaagccaacggtcttgccacaaattagtatattgcaaattacaaatgcttaaaaaaattcacagatatattcatcaattataccttttgattatcttgcaaataaatcttccaattcatattacctacgtcaaaatttagccatctacccttattatcccattatgaaaatttcaaaatcgataagatgacagacacccaacaacgaattatcattttatatactataggtattagatacctacaatttatttggtttattgggaatatacgattcataaattccctcataaaaatataaagcaaatgtggacggaagcaaaaaaactaaatatagaatggagagaaattgtattattaacttaggttacccatcgccaacaacctctcatttcctttcctaaactatttcacaattttggtcaaaaacacaatctaaccccaaaaaagattcgacctttgaaattcccaaaaccagaagcaaaacccccaaaagaaccctacttatagtgaaagaaaagtaacataataatatatatacacgagaaccaagagccacttgaatataaagttcacagtttttgtctgctcaccaaatcaaaccaatttctcctgatagccaaagtttttgtccccaacaagaaactcatgcaacattcttcacccactagctaactaacgacttccattcttattaatctctctcaattcttcatttctgagattcatcgctctctcttctctttgtcaca

SEQ ID NO: 239 - DNA, 2000 bp, Brassica napus
  source 1..2000: mol_type = genomic DNA
aatgaaatgggcctcaaatgcaatcaagaactaatctgaaacaacaacaacaacagcagcagcagcaaattcaaaatgattaatttcttagttgtgggtggtaaactataattgaatattcattaaaaaatgtgaaaatattataactttgaatagtccttcgaatattaaaagtgaattttaaaaatgaattatctattgatacccgcttgcacttggtgtttgttttggagatcttattacccaactataaaccgaaagttcaacattcacatgtattgtatgtttaaagctttgatctttccggttatatatatgtggataacgaacctcttttgcagctttatgggataaatctgcaatgaatacgttggcttctattacaaaaaaaaattacaactttgaagaaaattggtcaacaatgaatacgttggcttcaattaatatgaaagagagagagagatgcgttttcacttggcggtgggagatgtgtgattctctgatctggtccctacttcttgattcattcggtaacctaaaccttctacagccaagaagatactaataaggaagaaaactacatataactatataacaacttaaagttagtacattaaaatggaaaaggttatttattcgtctcacgtcttttaagtttgaactaaaaacaagtcgtcgaataactcaaataaattacatttggaagcccccttggtccagtggtttgactaagggttcattaatgcttttacatccggaggtttgaggttcaaaccccagaaaatactaaattatgcagattatggagaaataggttacaagagatcttcagcttggtgcatggcgtaccatcgaacatggatctcataggacggctcggagtgatgcagtcaggcgtgtattcttacaagacggtagaattgtcggctgtaaaatcgtctatgtaatgttctcatcattgtaatagcataattaatcagacgttcaaaaaaaaaaatacatttggaaactttctatattttacatgctttctagaaatctatgacattttaaatttaaataatggcatagtactaattgaaaacaaatcatacatgtctaatagtagctcatatattcgacgttttgtctaattagtcaacaatgaataatgaaattttttttaatagtagctcatatagaacattcttacgtttaatttggatactctatttgatacaacaatttcaattttctgtccgggtatttgagttttgcggtgtcaagatcgcattcctcaagcgtacaagttatgttaagatttaagaaccgtacgttgtttgatacattcaagttgaaaaaactgctaaaaaacttttatttttcttaaccaaacagaatctattcttgaaaaacgtgaaattttgtgtagtgttgttacagttttcttagtgaaagagaatatgcatgcatgatatcatctacctgaatacttttagtatgaaacatagtaaagagagaaagaaaaccgaggaagtcatccaaaaattgggaggcctactctcaactaccaaaataacacatcagtgtttgttgtgttaggtcgtttattcagtcacctaaccctaactaaatgaaatacgttaaaactcaaatatatagaaaaataaagaaatactattagtcaatatgactctttatttttttaacaactaaaaaaatctatcgtgcaatcaagaccgtccatgtatattctctctttcacattattctcaagtttttctctatagacgagaagattttttatgagcttgcgggtcccataataatactcatcaatttccccatatatatctcatgagttcgacttcataacattcaactcgacctcatatcattcaacaccagttactactttctctattcggatcaaaaatggtttgtgttattgcttctcatcatgttcttgtttagtttcacaaagtcttcaaagatctttccatattcataactcttctttt

SEQ ID NO: 240 - DNA, 2000 bp, Brassica napus
  source 1..2000: mol_type = genomic DNA
gagaagagatgcttgaatttgtctccaaaattctcaaggaagtagacttcaacacggtaagctagttcagtttgctgacactgactgaaatttaatagtctaaagacattcaataaatgttcttatactcaattttttttttcttgttaacaggctacattatcaactattctgaagaagctaagtacgttctttgattttgcttatatgttttgcaacctatgtttaattatactctccaaatgttgacgagttttttggtaacatttgccatttgtaataacatcaggtgaccatttcggtgttgatctctcgcatagaaaaccagaggtgaaggaggttatccaagatgctataaatgaaatgactgatgatgaagtagaagacgaagacgaaaaatctgaggctggaagtgacgaggagaaggaagaagaagagaaaaaagctgaggctgaaagtagcaaagagaaggatgaagaagaggaaaaagctgaggctgaaagtaacaaagagaaggatgaagaagaggaaaagctaaaggattaaggctagtgagtttcttctctcaaagatctgatgtgaagagaagcaaaacttatcaacactgtgcacgtgatagtttgtgagtgttgaacctatgctttgtactatgtaatctctatagtttcatcaatgtattatgtagtttcagtgacttcttcttgtgtagctgttacttgttaggttttctaatccttgtcctatttgctgccacttactggaaattttatgtttctgggtttaattttagtttaaagacatctttgtctgttttccgattttgggccaaagtaaatcatggttcttacttagccccaaaatcctgtctataaagtggagtattactgaatactcaatgataatatttccagtttttcctgacgccaccttatgttcaattattaatatgggactagttacaactaatgctatttgattacatataatcctctactgattcacaaattctaatgtatcttctattttaataaatcaactatcccagtgagacctttgtttgtgaagggtttggtttataatctggtggcttaaaagactagccaccaactccttatactttaccatttacactcagattgaatcacgttttatacacaaatagaagtcaaaggctctacagttcttcaaactttaagtgtaaacgcaaacaagataatagatccatttacatagactgatcaaagatggctccataatttgataattacatattaatcatatatcagtcaaccaccaactgctaaatatatataatattcaattgtttcattcccttacttacggcctttaccatctacaattaatttgaagtatatatctcctaaaattacatcaagtattgctgaaaaaaattcgagcatcttacaagttatgattcagattttaattatacaatttaaatgatccaattgtggctggttcttgacatatgtataacatgtgtactcttcttcttcttcttctttttttttttgtaactgataatatgtgtactcttgacatgtacaatatgggatcagcccagtcaggaatgaatcaaatgttttcgttttcactttgttacgttaatcagtttagttaaatgcatgcaaactcaaacaaatgaattatttagaaccaatcgtaatagagtccgttctattagaccgatctatctcgtcacaacatccacaactaagaatatcatatatcctggaaactaaactcaattctttaaaaaattatttgtaaaaaaactcttaaaagtgttaatctcaagactcctctctttttgatcttacttccaccatttgctgaaatatttacttgtaccacaattaacctcaaaccctagcctctacttaacccctttgattaaatcccaaaagaaatcaaagccattcctaatcctctaaacatataacatctttggtttctcttcaccaacaaaaaccctaaaa

SEQ ID NO: 241 - DNA, 2000 bp, Brassica napus
  source 1..2000: mol_type = genomic DNA
tgactttccaaaggtttttggtggttttttctaagaacagagatgatccccctcttggtggctcctagagtattaaaacataggtttagaaaataaaaacgtgcataatgaaatgaccaaaagacccttgagaaatcacaaattcgagtagaaataaaacgcgcagcgacctcagcccgtcgctccgacaagtcgctccaggcttcgggagcgacctcgctgtgtcgctgcgagaggtcgctccgggctcgttctcgcgtctccgggtgatgaaaccgcgagcgacttctccctgtcgctcccataacgtcgctcccagctggagcgacctcgctgtgtcgctccgagaggtcgctctgggctcgttctcgcgtctccgggtgatgaaaccgcgagcgacttctccctgtcgctctggttaggtcgctccagtagggtgatcagagcgacctcgctgtgtcgctccggactggtcgctcccatgccttgctcgcccaatgaccactctaaacactcctttttgagctccaaatgcctccaagtgtctccaagaactccatgtggtactccaatacctgataaggactcatgtatgcaaaatgcaacctaaacatggctaaatcctaatctatatgatcaaaatacacatggatgaatggataaaacaatagaaatatgcaagatatcaagttaatcaccagatagaagacacaaaaaaaacttcgaagaaaactggtcaacactcaacagttaatatgttggcttcggttaatatgaacgagagagatgcgttttcatttggaggtgggagtaatgtgattctctgatctgcatctggtccctacttcttgattgattcggtaacctaaaccgatccagctaagaagatacaaataaggaagataactacataaacttgaacaactaaactcatatattacaaagaaaaaaattaatttattcttctctcgtcttttaactgaaacaagtcgtggaattaatcaagtataatatacatttggaaacttctatattttacatgctttctagaatcttatgacattttaaattcaaataatggcatagtactactaactgaggcgtaaacaaatcatttgtataatagtagctgcttttattttatttttttattttttttaaacacctagtagctgcttttaatttttaggtttcggtaataaaccatcatgcttccctttttctatggaatattcttacattttaaccagctttcaaaaaaaaaacattcttacatttctcatgaaaacaaaccttttttctgagtaatatcaagattgcattcgtcgagcgaacaaattagataaatgtaataagaaccgttgatatattcaaatttaataaactttctctttttttcttaaccaaacataatctattcttgaaagacgtgaaactttgtgttgtgggttgaagttttcttagagacagagaatatgcatgatatcatcttagctaaatattttgaagtaaaagaaagaaatataaggaaacatagtaaagagagaaagataaattcaagtcatccaaaaattgggaggcctactctcaactaccaaaaagaacacattagtgtttgttgtgttaggtcatttattcagtcacctaaccctaactatatgaaatacgttaaaactcaaatatatagaaaaataaggaaatacgatttgttaatataactctttgtttgttttaataaataaaaacgcaatcttggaatcaagaccgtccatgtattctctctttcacattattctcacgctatgagcttgcgggtcccatgacaatcctcattaagattttcccatatatatctcatgagaatccaactcgacttcataacattcatcacttgttaaacccccaaaacaaagtttcatttttttttccacaaaccccattagtttgctgcttcctctatttggatagaaatatggtttgtgttatttgcttttcatatc

SEQ ID NO: 242 - DNA, 2000 bp, Brassica napus
  source 1..2000: mol_type = genomic DNA
tgataacaggcgacattatcaactattctgaagaagctaagtacgtcctttgattttgcttatatgttttgcaacctacgtttaatatgctttccaaatgttgaggagcattttggtaacgttcgtggtttgtgataacatcaggtgaccattttggtgttgatctctcacatagaaaaccagaggtgaaggaggttatccaagatgctataaatgaaatgactgatgatgaagtagaagacgaagacgaaaaatctgtggctggaagtgacgaggagaaggaagaagaagagaaaaatgacgaggctgaaagtagcaaagagaaggatgaagaagaggaaaagctaaaggattaaggtgttagttagtttcttctctcaaagatctgatgtgaagagaagcaaaacttatcaacattgtgcacgtgatagttagtgagtgctgaatctatgctttgtactatgtaatctctatagtttcatcacatgcattacactattatgtagtttcagtgacttcttcttgtgtagctgttacttgttaggttttctcatccttgtcctatttgctaccacttactggaaattttatgtttctgggtttaattgtagtttaagacatctttgtctgtttttcgattttgggccaaagtaaatcatggttcttacttagccccaaaattctgtctaaaaagtggagtattactgaatgataatatttccagtttttcctgacgccaccttatgttcaattattaatatgggactagttacaactaatgctatttgattacatataatcctctactgattaacaaattcaaatgtatcttctattttaatatatcaactatctcagtgagacctttgtttgtgaagggttaggtttataatctggtgacttaagactagccaccaactccttatactttaccattcacactgagattgaaccacgttttatacacaaccagaagtcaaaggctctacagttcttcaaactttaagtgtaaacgtaaacaatatagtagatccatttacatagactgatcaaagatggctccataatttgataattacatattaatcatatatcagtcaaccaccaactgctaaatatatataatattcaattgtttcattcccttacttacggcccttaccatctacaattaatttgaagtatatatttcctaaaattacatcaaagtattgctgaattttttttcgagcaccttacaagttatgattcagattttaactatacaatttaaatgatccaattgtggctggttcttgacatatgtatccatgtgtacttttttttttttttttttttttttttttttttaattaacctggagggatctcaacccccaggggactaactcctcggcgcgaggcagcccatttgttactatgagaattagatacccaattgtctggccaaacacttgggcgtatctgagggggaggatcgaacccgcggcccttaggaccaacgaactcgcctcgcgccactcgaccacaatcgcttggttaatatgtgtactcttgacatgtacaatatgggatcagcccagtcaggaaatgaatcaaacgttttcgttttcactttgttacgttaattagtttagttaaatgcatgcaaactcaaacaaataaattatttagaaccaatcgtaatagagtccattctattagaccgatctatctcgtcacaatgtacatccataccaagaatatcatatatcctggaaactaaactcaattcttaaaaaaattatataaaaaaaaactcttaaaagtgttaatctcaagactcctctcttttgatcttacttctaccatttgctgaaatatttacttgtaccacaattaacctcaaaccctagcctctacttaacccctttgattaaatcccaaaagaaatcaaagccattcccaatcctctaaacatataacatctttggtttcccttcaccaacaaaaaccctaaaa

SEQ ID NO: 243 - DNA, 2000 bp, Brassica napus
  source 1..2000: mol_type = genomic DNA
gtttctgctctttaaaagtgcactgaattgaggcttctctgcataatcaaacaccttgtttgttgattgaatttggttgcacaaagtgaagtttttgaaatcgggtcatgacttgctcagaaaatctatgttaccgggtatgattgggagtccacataagtttggttagcttcatcttgtttgaaagagtttgccttgaggctgagttgttttatgagtctctccgatgatatgtctaatgcatatattggcatttatgagtccctgctgtctttgctgaacacgaggacattcttttttttttgtattctgttgaaagccacaaacaatgaaattggcctcaaatgcaatcaagaactaatctgaaacaacaacagcatattctttttttttaacaacaacagcatattcaaaatgattaatttctaagttgtgggtggtaagtactacaactgaatattcattaaaaaactgagcaaattacaaatgtgaaaatattataactttgaatagtcctttgaatattgaaagtgaattttaaaaatgaattatctattgatacccgcttgcacttggtgtttgttttggagatcttattacccaactataaactgaaagttcaacattcacatgtattgtatgtttaaagctttgatctttccggttatatatatgtggataaagaacctcttttgcagctttatgggataaatctgcagtgaatacgctggcttctattacaaaaaaaatacaactttgaagaaaattggtcaacaatgaatacgttggcttcaatttatatgaaagagagacagagagatgcgttttcacttggcggtgggagatgtgtgattctctgatctggtccctacttcttgattcattcggtaaaaccttctacagccaagaagatactaataaggaaaaaaactacttaattctaacaacctaaagttagtacattaaaatggaaaaaaacttatttattcgtctcacgtcttaactaaaaacaagtcgtcgaataactcaaataaattatatttggaaactttctatattttacatgctttctagaaatctatgacattttaaatttaaataatggcatagtactaattgaaaacaaatcatacatgtctaatagtagctcacatagaacattcttacgttttggatactctatatgatacaacaatttcaattttttgcccgggtatttgagttttgcggtgtcaagatcgcattcctcaagcgtgcaagttatgttaagatttaagaaccgtacgttgtttgatacattcaagttgaaaaaactgctaaaaacttttatttttcctaaccaaacagaatctattcttgaaaaacgtgaaattttgtgtagtgtttgtcacagttttcttagtgaaagagaatatgcatgcatgatatcatctacctgaatacttttagtatgaaacatagtaaagagaattttcataaaaaaaaaacatagtaaagagagaaagaaaaccgaggaagtcatccaaaaattgggaggcctactctcaactgccaaaataacacattagtgtttgttgtgttaggtcgtttattcagtcacctaaccctaactaaatgaaatacgttaaaactcaaatatatagaaaaataaagaaatactattagtcaatatgactctttatttttttaacaactaaaaaaaatctatcgtgcaatcaagaccgtccatgtatattctctctttcacattattctcaagtttttccctaaagaagagaagattttttatgagcttgcgggtcccataaactcatcaatttccccatatatatctcatgagctcgatcttcataacattcaactcgacctcatatccttcaacaccagttactactttctctattcggatcaaaaatggtttgtgttattgcttctcatcatgttcttgtttagtttcacaaagtcttcaaagatctttccatgttcataacttttctttt

SEQ ID NO: 244 - DNA, 2000 bp, Brassica napus
  source 1..2000: mol_type = genomic DNA
aatacaggatcattacaaaatgtggatcatcttatcataggtgataaaagtagatgttatatcgatggagcttggagggcacaagatttgtgcacaggacaaggatggttttatgaagcaggtggatctactgatactatgatgggtgccatgtctattcgcaaaagtctatcacctttacatgcagaatgtgaaactttgatatgggcgatggagtgcatgaagaccctacgaatctcagaagtggtgtttgcaactgactgctctcaactggtgaaaatggtgtctacaccaacagaatggacagcgttcactacacacatggaagagtttctacgatgtaaggaattttttcatcccttcactattcagcatattccgagggcacaaaatacattgccggacaagctggcacgaggtgctagaaatcagcctgctgctatggtttatgttgattcgattcctccaaggtggctcttggatcaggaatctacttagtttcgttatagccttttgttgtaaaaaaaaaaaaaaaaaaaactcatattttttttttttttttttgtaacaactaaactcacactccctccgtttcataatagatgatgttttgaagagttattgatgtttcaaaatacatgatgtttgatattttttaattagtttaaaagtcattgaaaaatgtgtgaccaatgatgttttatagtatttttatgattggctggattagatttatttaatatttttagtgttactttttagaaaaatgtgtatatcttaattcttgtgcatttatccaaaacatcaactattttgaaacaaacatagtatattacaaaggaaaaaaaaagaacttattcttctctcgtcttttaactgaaacaagtcgtggaattaatcaagtataatacatttggaaacttctatattttacatgctttctagaatcttatgacattttaaattcaaataatggcatagtactaactgagacgtaaacaaatcatttgtataatagtagctcatggcttttaatttttaggttttcgctaataaaccatgcttccctttttctatggaacattcttacatttttaaccagctttcaaaaaaaaaaacattcttacatttctcatgaaaacaaacctttttctgagtaatatcaagatgtttagcaaaaacaaataattgtatcaagattgcattcgccgagcgaacaaattagataaatgtaagaaccgttgatatattcaaattgaataaactttctctttttttcttaaccaaacataatctattcttgaaagacgtgaaattttgtgttgtgtggttgaagttttcttagagaaagagaatatgcatgatatcatcttagctaaatacttttaagttttaagtaaaagaaagacatataaggaaacatagtaaagagagaaagataaattcaagtcatccaaaaattgggaggcctactctcaactaccaaaaagaacacattagtgtttgttgtgttaggtcatttattcagtcaccaaacctaactatatgaaatacgttaaaactcaaatatatagaaaaataaggaaatacgatttgttaatacaactctttgtttgttttaataaataaaaacgcaatcttgcaatcaagaccgtccatgtattctctctttcacattattctcacgttatgagcttgcgggtcccatgacaatcctccttaattttcccatatatatctcatgagaatccaactcgacttcataacattcatcacttgttaaacccccaaaacaaagttcaattttttttcccacaaaccccattagtttggtgcttcctctatttggatagaaatatggtttgtgttatttgcttttcatatcatgttcttgtttggtttcataaagtctttaaagatcttttcatatccaatcttctttaatttttgtacttcagggtgcggaaaacaccaacaaggaagtaacactctctgattca

SEQ ID NO: 245 - DNA, 2000 bp, Brassica napus
  source 1..2000: mol_type = genomic DNA
ataaaataaatgaaaacaaaaacccgtgcagttgcgcggatcgagatctagttttaattaatcattatttcgtttatgaaaatcaatagaaaagaagaaggtgaacggtaacatattctcatcccaccctgcgttgttcaaggtctaattctccgaatggtaataatgaattgagcggtacaggacaagcatattggatattttggtacgatttaactgcgagttgtataagagaacaactgcgattcatctaaaaagtagttcaaaacaaaatataaattgtgacatgtacaataaataatataactgcaggatacatataatatatttatagtttacaaactaaaaaatcagtgatactaatataacttttaaaaatataaattttattttaaaacttattttatatatctcaaatataaaatttaataagctattattgagatatatatatatatatagccaattattttgggcttaaaaattgtaattgcgctagctgtctttaaaaaaaataaattaaaatatctgaaaatattttattaatttatatatgtaaattaaggtatcagtgatacaaatataacttaaacaactattttattttatttatcaaaatcttttatatatctataaacatttacaagtcatattcacatatttcctcatctgaaatattgtatttgaaattttaaaattgtagttaggcatggcacatttatctggaactaaaccgaactaaaaacgaggctcgtttgggtttggatcatatcaattatactagtggatcctatatttctagaaccaaaaaggccaacaaccgaacctgaattaaatcgaaaaccaaaacagaaccaagctgagaaccgaataggtacctaaatttatataatatattttatatatttataaattttaattaaatttagttttgaaataataaaataatttaaaatattatttataagtcaaaatacctaaaataatgaattactagaatagttttcaatcaatacggagatacaaaacaacaaaatcgttagataagatagtttaaacgagaaccgctaccgttaggtttcagcacttagttattaaatttatactaaattataattaagtactggtataattattatttttttgaaaaaaaatattgttagttttttaattttgttaattaaatagtatacattttaacttcaatgtaggtatattatatggacaagatagtagtgattacatctgtgatttaatataatttttaatataattttgaaagtatttttattacaaaagtgactaatcacattttattttatttttcttttcagattcaactgtggtttacaataaaatttatcccgcaccttcttcttttacaatttatgattattttatttattaaaaacaatggcagtaaaattggttgaatggtgacccatcatctctctttccgccatgcgttacacttgtcccgcttttaacatccatagcctacatctggctattattataccagtgaattacttgatgcaattatactttgatacttcgagtctccgactttgtaatcagaggattgtatcatttactaacaagttattctgaacctaataaaaactcctcattattattaatgaaagatccaacgttgactttttatataataatagacccgttacgtcaagtatgaccctattgttataaatcactcctatcgatcaactaaccgattagactcaataaatccaataaatcgtccaaagtctacaaaatgtattcaagtcgccagagctttcatggtcgttgtcaagcctttctgttttactcgttatctacaatcttcacttgcgaaacgagatacctaaaccctaaactctacttaaacccccttaataagtagcctatatatacatatatcttgatctttctccattcctcactgcattggattcaaaaacttctaactaaacgtttattaatcgaaaccccttgaa

SEQ ID NO: 246 - DNA, 2000 bp, Brassica napus
  source 1..2000: mol_type = genomic DNA
atgtcctcagaatctttaattctcggtattcccaaaattccgaggaaattttactttccgacgagaaatttccgacgaccattctcgtcggtatgtcctcggaataccgttattctgaggacataccgacgatatttgtcgtcggaatcccggtgttttcttgtagtgtattctctatatatgggtacactctccccacatgataaccaaatttaactgtatattttccattttggtgaagtgacaaccatctctgtctgttatatagttcagactcaaaggcaaactttctataatatttgcatcctccggttctgatttaaaataaagaaatctgatactaatttttgcatctttcggttccgatttaaaatgaagtgtttctactccgaatggtaaccaatgattgagcagtgcaggacaagcggattagatattaccgtacggtctatctgtggtttatatagtagaaatacatattgcagaacaactgaaattccatataaaataagcggttcaaaacaaaatctgaatagtgacatatataatgaatagtgtaactacgggatacatataatatatttatactttacaaactaaaaagtcagtagtaggatgtcaaaaaaaaaagagtcagtagtagtaatataatttttaaaatataaatgtttttaaaaatattttataaatctgaaatccgaaccggaattaatccgaaaatcaaaccggaactaaaccgagaaccgaataggtacctgaatttacataatatagtttctatatttataaatattaattaattttttcaaaaaaattatcaaataatttaaaaatattatttataagtcaaaatacctaaaaaattgaattactaaattactagaatatttttcaatcaatacagagatgcaaaacaacaagatcgttaaataagatagtttaaatgagaaccgctacagttaggtttagccatttaggtatttaaatttatactaaattactaattaagtactagtatagttaattttattttatttttgaaaaatatagttaatattttaattttgttaattaaatagtatacattttaacttcaatttaggtatattgtatggacaaaatgaatagcagtgattacatatgtgatttaatatagtttttaaatataattttgaaagtatttttatttttttttcttttcagattcaactgtggtttacaataaaatttgtcccgcaccttcttcttttacaatttatgattattttatttattaaaaaaatggcagtaaatggtgacctatctttcttcccgccatgcgttacacttgtcccgcttttaacatccatagcctacatctggctattattataccagtgaattacgtgatgcgatttacaaatcttgagtgataatttcacacactaagctgcatatactttgatgcgatttacaaatcttgagtgataatttcacacactaagctgcatatacttcaattatactttgatacaaaaaaaagaaaaagaaaaaaaaaattatactttgatacttcgagtctccgattttgtaatcagaggattgtatcatttactaacaagttattctgaacctaataaaaactcctcattattattaaggaaagatccaacgttgactttttatataataatagacccgttacgtcaagtatgaccctattgttataaatcactcctatcgatcaactaaccgattagactcaaataaatccaatcaatcgtccaaagtctacaaaatgtatttaagtcgccaaagctttcatggtccttgtcaagcctttctgttttactcgttatctacaatcttcacttgcgaaacgagatacctgaaccctaaactctacttaaacccccttaataagtaccctatatatacatatatcttgatctttctccattcctcactgcattggattcaaaaacttctaactaaacgtttattaatcgaaaccccttgaa

SEQ ID NO: 247 - DNA, 2000 bp, Brassica napus
  source 1..2000: mol_type = genomic DNA
tttaatacattactttataacagtttataaaacttcataaacattttaataattttacatatgattaatacggtttcacaattattttataagtttttacagattctgctactttttaggataaaataatctaatattattcgtgatactactgaaacatatattgcaatacaataataataaatcaaatatatttctattgatcaagaaaacaaacaaaaatagaatgtattggaataaaaataatcatgcattattttttggaatatggagaaagtatgagcgagatgacggaaatcatgaaaataagaaaaagtgtgtcctaactctaaatagaaagattgacttcgtgagtgaattatccttcacaatttttaagacttaatataacttagaaaaattaaattatttgatagttgacaatgacaatataaacacacaaattttcttataccactattgccaaatatcaaataatttaatattttgaagttatattaagctgtaagtagtgtttaaaattattaatttaggatgtataaattaattttataataaagttatgtattaaaatttataaattaattttaaaagcttataaatcaaactaaaacaatatataaatgataataaagattttaaaaaaaattaatgacttttagtgaaaaaaccccttaactatttttgaatcttaaaaaaaaatcatgaactaagtttttaacattataaaccctcaacttataaactgttaacgtatgtcatcctccgtcacggtttttcagacagagggtaacatatgttaacggaattaaaattgagggtttatttcacaggatttttagttgagggttttatttacgattcatctttagttcaggggtttaattactaaaaacccttttagtaattggtgtttacttatcgacgatgccaattcaacttgggtttttttacatagatttcatgacaaccaaatttcttccataccatttgattccatccaaacctcagctaacataattaaagagacggataagaaactgcaaaggaaaaatgttttgtaaacactcaagtttgtgtctaaatttttaattaatatagacttgaaagcgttgtgttgttgtgttacataacaactataagtcgtatgatcatatctgtatgaaaaatactattatgacacatacgttctgttagaattccaagctttcttttcatctttaacattatcggtcaggtaggcaaccaaacaaccagtttaattattattgaattgagataaggtttcactctggcaaatgatttcacagaacaacatatacgataaattctaaccaaactaaataaactgaacctaataaactaattcggttggactggtaagtttctcttcggtcgaataaaacaaaacaaaatcaaatccaaacagtaaagaaacatatatcaataatatctctaccaaaaatctgtaccactaatttacatttacatgatacttgtccacgtttcagattctaaatatagccacattaatacattacacttaaagctagaattatttttctcatggactatatgctgtgattatataataaggtcagtaacctagctaaatccgtatatttagctgtagccattgcctaatttcggtgcattctgccaacaatttggaccaaatttgttagtttaaaaaacagtttggaccaaattaattggttagtttaaaaccattaattttgttctatacacgtaacattacgtgcactatttttttgacatctctctatgactatataatattgacttgtctaaacattttgtaatatatagaaacatgcacaattccggtaggtgcaatattgataaactgccattgcaatagataccaatcaatccaaaccttataacatagaacgttatatttcactttcttccattctcatcagtcgacacaaaattaatattcgatcacataaccaaaaagaagagaagaaaaaaaa

SEQ ID NO: 248 - DNA, 2000 bp, Brassica napus
  source 1..2000: mol_type = genomic DNA
tggtgacttcgatgaagatggatcctgagtattggaacaaggttagtgtttttagcttgttccatattttgaactttaaatgatattagagtttgaagttttttatttacgtttttattgttgacaggcaccacggagaccgtgttgcgaggtaatggaaggaagaggaagaagaaaggaggaggaaatgtcgataaggattagaaagtgcagatctgcggagatgatatgaaagcaacgttttggttagagagatacatttgcacatacgacttcttttagattcaatcatagttggtttcctaaatttctggtaccatgaagtgacgatttactcttatcaaatacctggtctcatgtgtatttcagtctgcaaacgtttgtttctgtgtattattagtcaaataatatcaaaactccatagttatacacttgtactcatatatgcatggtaaatatgtcaggatttaaccgttgataacatttgtttaaggtgtatattaactcttttgaagaggcttggactaggtataaacttcaatacacacgtgaatttttaaactaagttcgaataatgatttttgttaattaatgtgaatcaacgtgtagaaatctttaggagatccatgtctataatgtcccaaatccagtttatatagattcaaattatgatttttgatatatcgatgtaagattttgttaaaaattttgtatgtttgtcatagatttacatcataaattaacaacctcgtccataccatttggtcataactatttatctatttaagtacatttatttagtattttattctatcaaatttggttgataagaaatctaagacaccctagcggaattctaactatttaattatatagttttattaaaatcaaaccaactgaaccaaaccaattctaacagtaactaacaaaaaaactggttacctgaaaacaaatcaacgtgtcttgttttaattttgtgtcttctgatgaaagtagccgctttgtttcctaccaaacctcatctaacatagttagagacgacagataggaatttgcgtcaagaaaaacggcttgtaaacacgcaagtttatgtcagaaataatatagactcgaggaattgtgtaaaatactaatttatcagctgagatttgtgttattcttatgtactgagatttacaagcattctcatctatcagctgtaacattatcggccaggtaggcaaccaaaccggaccagcttaattaaactgaattgtgataagatcaattagttcaccgcctcacccggaaaagtagcatatgcaaagcgtagaaatcacatgatcttttttttttgggtgaaaaatgttaacaaattacatgatctttggaagaaacctatgtggtttcgaagtattatgggcggcctacaaccgggtatatatttaaaaaaaattactttgaaatgatctcacagaccaacataagaaaatctaaccagactaagataaattgaacaaaaaatcaattcggttggaatatatagggataagttctctccagtcaaattaacatgcataaactatatgctattctcacatgatacggtcagtaacctaattactcgtatatttgcctgttttcacagcctaattttggtgcattatgccaacaatctggacatgattggttaattttaaaccatcatttttttttgctatccacataagattacgtgaattacttcaccaggaggaaaacagatgacgtgtataatcgtgttttcttcacatatctctatatataatattgacttatcgaaaaaatcaacttaaaaaaacatgtacagttacggtaggtgcaatattgataaactgccattgtgttatagagacgagccagtccacacctttataacataaaacgttacaatccattttcttccatcttcaaaccagtcaaaactcaaaactaacattcgatcaaacaaaccgaaaggaagagaagaaatagaattggtg

SEQ ID NO: 249 - DNA, 2000 bp, Brassica napus
  source 1..2000: mol_type = genomic DNA
taggaatgttcatttcataaatagtcatattagaaatttactatgtatatgtgttaataaatttaattataaatcatataaaaagataaaagtgattatttggatttgttaccattaaatgattgaaaataaataacaatggttgttttgatttatatgcatgtgctaatttaattacatatataacacttacagatcttttaattattcaatatatatttattattttattatttcataatatgtaaaataatacgtaaaacgcaagtacataatagtacgtaaaaatatttgtatatacgatacagatcttaaactaagttacaacttaaaaaaaaaacacaaaacacatgaggtccggtatctacattattaatactgaagtacatttgaaaaataacttttgattcatcttaaatattacaagttttgcccttagcttttctttttaaaagaaaaaatcaataaggaaatattccatagaaaaattaaatgtattttgcacatttataactaatttattagtctagttctaacatataagcaccatatttttataatgacaatagagtatcccgaatataatgctcgtgccatcaatttaaatgctaagcatagttttatattttgtaataaaaccaaccagataatatatggtatattttattgaaattggtttctagaatattttaattcacccacaacccatgcaactcctatataaaattcatcatgccagaacgattactccaactattatacaaaatcaatgtgtgatatatttcattttcagatattttttgtggtgatgatatattccaaagttaaaaaattaatttaaaaagaaataaagatgaattgggttattataaatattttacagttatatttttacaggttattccattaactataaaaatagtatcaaaagtattgaaagtatgtggaatacaaatttgttttttttttttttatgttttaataaatctgatttttaatcaaacaaaaatatactattaaatgtatattaaataaaacctttcaataacttttatattaaatttaaatatatacttcgttttataatttcagaaaactaatttcaaaattattataatttatattaatttaatttcggattattttgtcaaattttaatttcgaattagtattaaataaagagtggtgacgttaaattttaaaatataaataggtattgatttacttgataaactataaaattaagtaaatttctatcatcttattaagcgatggatcagggtattacaaatatttttacatttatattttatggattattccatcaaacatacaatatactcatgaaaagtaatgaaagtatttagagcattgaaaatatctttatattttaataaatctgatttcaaatcatattaactaatatccataaaatttatgaaaaataaacatagttatagttcttagtatgaaattgaataaactaaaaacaagaagtatataaactaaaacgaatcaaagtagatatggttttaatatggtaactgtttcatataaagcaaaaaaactgaaaatgaaccaaacttttaattgaacgctcccatctcaaatgatgaaaatatttcatatcataaaataaaactatagcgtttatttaagaatttaaaattataatttttattaaatattttttgacaacaaaaataattccaggctttcaaagtgcatatcaaaatttagtctaatattattccaatgcacattgacttcaggattattatgaatcattaatgtgtaatccagatatatatatttattgatccaccacaaataaattaatgcgttcaacaaaacaaaataaaagtggttgcgaaactgataaactgccgtgtgatattgcattagagacaagttaattcaaaccttataaaaactaactatatgatcaaatacttttcataaccaaacaaaccgaaacccaaagaaacaattgagtggtg

SEQ ID NO: 250 - DNA, 2000 bp, Brassica napus
  source 1..2000: mol_type = genomic DNA
cggcggagagatcggtggagtgagggagaacagatcggcggcgagatcggttgggtgaattcgtcggagagaaacgcagagagagaggcggagagaaaggcagagtgagaggcggagcgaaacgcggagagagaggcttttcgtttggcggaattcgtctagaggcgttgaaccgtcgagagagaagaaaagagagaagagaagagaagagaagagagaagagagaatgatgtcgagacggtaactcgacggtctctccccattttctctttcctctattttgctgacacgtggccttaacatccgttccctaaaaactctaacttaacatacatttgcaaagttttcatttagtttagatttaaatttcgaaattaatgtcctaaggacgcggcttaataccgcgataatgatgctcttagaattccaagctttcttttcatctgtaacattatcggtcaggtaggcaaccaaacacggaccagtttaattattattgaattgagataaggtttcacattggcaaatgatttcacagaacaacatatacgaaaacttctaaccaaactaaataaactaattcggttggactatatgataagtttctcttcggtcgaattaaacaaaacaaaatcaaatccaaacaataaagaaacatatatcaataatatctctaccaaaaatctgtaccactaatttacatttacatgatacttgtacacgtttcagattctaaatatagccacgttaatacaacttatatattaaaacagaagttacaaccttgattcatgtgtgattttttaaaaaatagatctaatggacttattcctacaaagtcatgttacatttaatctctaatcttatcatttaaattttaggtctacgagaaacttttattgggctatcagtaattagatttaaagaatagatgattcattggatttatagatagtataaattaaatagatataatttaatgttgtaatactatacctccatatattaaatatttaaatatttgtcgatgttaacttttaaaattattaaaaaaattattaaaataaaaaaattatattatctaacaatgatcaatctttactaccttaaactaatgaaaacaaattttaaactatatagtttattttaaaaattaaacaagaactaaatgtttaattatttactcgttgatataaatatatgaagcgaaaagttcaatttttaaaaaactttctaaatctgtgaaatgttacaatatctttgaatatgacaataaaacaatattttactaatctttatatatatagttacgattttaataatgaaataataatccgaaaatatatatatagaagaagatacaaatacatgtgaaagtttaaaacaatctattcaatagaaaaaatatactgtaaacttattatgttttaaaaattgatagacatatatattataatatatactaatttagaattgaaaataaaatatttatataaaaataaatgaaaacaaaaatccgtgcggttgcgcggatcgagatctagttacactttctagttacacttaaagctagaattatttttcacatggactatatgatgtgattatataataaggtcagtaacctagctaactacgtatatttagctgtagccattgcctaatttcggtgcattctgccaacaatttggaccaaattggttagtttaaaaaacagtttggaccaaattaattggttagtttaaaaccattaattttgttctatacacgtaacattacgtgcactatttcatcagaaaagaaaacatgtgacgtgtgtaatcgtatttttttgacatctctctatgactatatataatattgacttgtctaaacattttgtaatatatagaaacatgcacaattccggtaggtgcaatattgataaactgccattgcaatagagacgaatcaataattaatattcgatcacataaccaaaaagaagagaagaacaaaaa

SEQ ID NO: 251 - DNA, 2000 bp, Brassica napus
  source 1..2000: mol_type = genomic DNA
tgtgctgcgaagttatggtcttagtaaaagcattgacgcagctgatgacactatcatagccggcaccctattgggaagtatattcgtctttgctccgatttcaaggtatgtgttgacatagctagtttatggtttttcattgcagcatctgcatatcatggaatattgatagtgttaatatgaaaatatttttgggcttgtgttatactttagttacccgtaagcttgcaccagaaattttgtttgtgcttattttccatgagaagttaagtgactgaccacaaatttctgtagggaggaatatgagctcctagaagctgtccaagcaaagctcgtggtccatcctctgactgctcctgttcttggtaatgatcataaggagttccgaggtcgagagaatccggtaagcgaaccacaaagcagttctaatttttttagatgtgacatgaaatatcatttcactgcctgcattgggttggtcattaaatttgcgtgcgactcagacatatatatagaggatattgttaaaagttgtttcttatccattattggtagtatgaaacataagttttgacaattttgcagtcccaagcgacaaagattctggatggagacatgcttgctcagttcttggagcttacaaatagacagcaggagtcagttttatcgacgcctcagccatcctcaagcacattaaaatcaagttcaaagcaatgttcttctccgcctctcatgctacaccaagttgtacaattgctagagcgtgtccattacgctctccactagtccatcctcttctcagctccctttctttcgcaagattgccagcctatattccacgaccaacggtttcaatgatccaatttggtacgcaactgaggccaaattctttataaaagtggtagtgaagtggtgaattgtgaatacttacaagcttatcgacatgattgcttatagggtgcaaaagagtggaaaaaaacatccagagtcataggagctgcctttgtgttcttgagggcaatgagtcttaacgactagtccttattctctccctctgagacattttgtggaggagcataatactttccctatgtacagaagttgagatgtggtttcttttaacgcctaggactcggtatcattgtgtacataaagaataaccaaatgtttcttcatgttatgttaaactttaaacaaagggatagatagacaaactgatttgataaaaatatatatagaaatattagttgtttgtctgtttcaaaggatttacttgcattaagcattttttctgctgtctgcataatttcgatgctttcacaactacgctattaccttgtctgagcaaaaagttcatgtataagaaacatacaagcataggatcttacaattcttgatcttactttataaatatcgataaatgaaaataatttcgcaaacataacaactagagatgggcatttaagaacattttaaacaaatggattaaaattttacacttaaactaatttcacatgcaacaaacaaatcgataatcaaagttgaaaaaaaaacaaaaaaaaaacaaatcgatgatgataaataatatatggttaaaacatttcagtttcatgttatataagtcaatggagtgtgtggactggggaaaaaaaacaaaagaatttccgtgtaattccaattatgaaaagtttaggtttagaaatgtttaaatggtttctactggatgttttgatgattaatcaaatcgttaaacaagaaacatgaactgacagttgattattaagcaacttacgtaaaccattcatataaatattatgggctgactatatgatatatatacgtaatgtgatcgtaaccaacaagaaaataaagaaacatcacataatgagcatgtgagtactatggcaggtcatttcattaaataaaaactctaactaagttcatgcaagtcttataccaaaacctaaactttgatctctaaacaaacaagttctcaagaa

SEQ ID NO: 252 - DNA, 2000 bp, Brassica napus
  source 1..2000: mol_type = genomic DNA
aacatttgcacatacgacttcatttagattcaatcatagttggtttcctaaatttctggtaccatgaagtgacgatttactcttatcaatacctgggctcatgtgtatttcagtttgcaaacgtttgtttctttgtattattagtcaaaataatatcaaaactccatagttatacacttgtactcatacatgcatggttatggttagtatgtcaggatttaaccgttgataacatttgattaaggtgtatattaactcttttgaagagacttggactaggtataaacttcaatacacacgtgaatttttaaactaagttcgaataataatttttgttaactaatgtgaataaacgtgtggaaatctttaggagatccatgtctataatgtcccaaatccagtttatatagattcaaattatgatttcggatatatcgatgtaagattttgttgaaaattttgtatgtttgtcatagatttacatcataaattaacaacctcgtccataccatttggtcataactatttatctaattaagtacatttatttcagtattttattctatcaattttggttgataagaaatctaagacaccctagcggaattctaactatttaattatatagttttattaaaatcaaaccaaccgaaccaaaccaattataacagtaacttacaaaaaattggttacctgaaaacaaatcaaatcaacgtgtcttgttgtatttattttttctgatgacagtagccgctttgtttcctaccaaacctcatctaacatagttagaggcgacagataggaatttgcgtcaaggaaaacggcttgtaaacacgcaagtttatgtcaaaaataatatagactcgagatattgtgtaaaatactaattcatcagctgagatttgtgttattcttatgtactgagatttacaagcattctcgtctatcagctgtaacagtatcggccaggtaggcaaccaaaccggaccaggttaattaaactgaattgtgataagatcaattagctcacccggaaaagtagcatatgcaaagcgtagaaatcacatgatcttttttttgggtgaaaaatgttaacaaattacatgatctttggaagaaacctatgtggtttcgaagtattagagcatcattatgggtgaaacccttttttgggtttctaatttttttttttttttttttttttggtttcggctgatttaaaaaaaaaaaaattaaaaaatgaaccaatcgcggaccgccacgtatcggtggggcccgcgaacacataacccaccacgatcatttcttcattcagactttttgcaaccggttttccacttttgtgggacccaaaatctttaaaaactccatttgaaacctgtaataatggtgctcttatgggtggtctacaaccacgtatacattaaaaaaaatttactttgaaatgatctcacagaccaacataagaaaatctaaccagactaagataaattgaaccaaaaatcaattcggttggagtatatatcataagttctctccagtcaaattaacatgcataaactatatgctattctcatatgatacggtcagtaacctaattactcgtatatttgcctgttctcacagcctaattttggtgcattatgccaacaatttggacatgattggttaattttaaaccatcatttttctgttatccacataagattacgtgaattacttcaccaggaggaaaacagatgacgtgtataatcgtgttttcttcacatatctctatatataatattgacttatcgaaaaaaatcaacttcaaaaaaacatgtacagttacggtaggtgcaatattgataaactgccattgcattatagagacgagccagtccacacctttataacataaaacgttacaatccattttcttccatcttcaaaccagtcaaaactcaaaactaacattcgatcaaacaaacgaaaaaggaagagaagaaatagaattggtg

SEQ ID NO: 253 - DNA, 2000 bp, Brassica napus
  source 1..2000: mol_type = genomic DNA
ataacaatggttgttttgatttatatgcatatgccaatttaattacatgtataatagttacagattttttaattcaacatatatttcttattttattatttcatgatgtgtaaaataatatgtaaagcgcaaataaataatagtatgtaaaactatttgtatatacaatattcatgtcttgtgagtcgtggatcttaaactagttacaattaaaaaacacaaaacacatgaggtccaatatctatattattaataatgaagtatatttgaagaataacccttgattcatcataaatattacaagattttcccttagctttctttttaaaagaataaatcaataaggaaatattccatagaaaatttaacgtattttacacatttataattaatttattagtctatttctaacatataagcaccatatttttataatgacaatagagtatcccgaatataatgctcgtgccatcaatttaaatcctaagcatagttatttttctttttaataaaaccaatcagatagtatactatatgatatattttattgaaattggtttctataatattttaattcagaccggtccagttggcctagaggtagttgaggactagatccaatacgctccctgcaggttcgactcgcgctggccacccgagctgccttaaatggtaagaatacgtggagtgccgtgggcccgtaaagaatagtcggttgaccacagtcgtcggacatcctacgttaaccaaaaaaaatatatatatattttaattcacccacaacccatgcaactcgtatataaagttcaccatgccagaactattactccaactattatacaaaatcaatgtgtgatatatttcattttcagatatttttgtagtgataatttattccaaagttaaaaattttaatctaaaaaaaataaagatgaattgggttattataaatattttacagttatattcttacatgttattccatcaaccataaaaatagcaatcaaaagtatgtggaatacaaaaaaaaaactttatgttttaataaatctgatttttaatcaaataaaagtatactattatatattttataagattgtatattaacaaaacctttcaataacttttatattgaattaaatgtatatttcgttttatataaaagttacacaatttcagaaaactaatttcaaaattatgataatttatattaatttaattttggatttttcttcaaattttaatttcagattagtattgaataaagattggttaagttaaattttaaaatataaataggtattgatttacttgataaaagtataaaattaggtaaatttctatcatcatattgagcgatggatcatggtattacaaatattttacatttataattttacggattatttcatcaaacatacaatatactcatcaaaagtactgaaagtatctagaatattgaaaatatctttatattttagtaatctgatttcaaatcatataaactaatatccataaaatttatgaaaaataaacgtagttatagttcttagtataaaattgaataaaccaaataaaaatatagtataaactaaaattgtgcaatccaaacatttatcctattaaaggaaaataactgaaataattcagatataaaaatgaaaaagttatgtataaaacttaaaatatataaattatatttaaaattataatttttattaaatattttttttgtctaatattatttcagtgcacattgacttcaggattattatgaatcattaaatgtgtaatccaggtatatatatttattgatcaacgacaaataaaataatgcgttcaacaaaacaaaacaaaataaaagtggttgcgaaactgataaactgccgtgtgatattgcattagagacaagttaattcaaaccttataaaaactaactatatgatcaaataattttcataaccaaacaaaccgaaacccaaagaaacaattaagtggtg

SEQ ID NO: 254 - DNA, 2000 bp, Brassica napus
  source 1..2000: mol_type = genomic DNA
ccgccttcgtactgtgtcctcacggagtatttacctgaagggtctctaagatcgtatttgcacaagcctgagaataggactctttctttgaaaaagctgatcgagtttgctttggatattgcgaaaggaatggagtatattcactcacggcgcattattcatcgagatcttaagccggaaaatgtgttgatagatgaagacttccagctgaagattgctgactttgggatagcgtgtgaggaggagtactgtgacatgttggctgatgatccagggacttataggtggatggctcctgaaatgattaaaaggaaacctcatgggagaaaggctgatgtttacagctttggattagttctttgggaaatggtagctggagctataccttatgaggatatgaatcctattcaagctgctttcgcagtggtacacaaggtaaaatgttaagctgtctactgactatttcgtgatttttttaaccatttgagacctgaaaaatgttgatctttggtgcagaacattaggccggctatccctgaagattgtccagcagttatgaaagctctgattgagcagtgttggtcggttgcaccggacaagagaccggagttctggcagatagtgaaagtacttgaacagtttagggtttcactggaacgtgaagggagcttgaatctgacgtcaaacaagatctgcaaggatccaagaaagagtctgaaacattggattaagaagcttggaccgcaaggaggaggaacagcaggaggaggtgcaggaggcagcagcagcagcggcggccttggtcgctctgccatgcctaaccctaaattcgcttgagagatttgaagtctctcttctgtatattatatataaagataccaaaaagggttctgtgttgtgtcctgtttgtgggttgtgatgtgatcttttcatcttcttctctagatttgttgtgtaatgacaatcaaactggggaatggtttgtgattcgatgtttatgggattcattatcgtttctctactagtgcacaaatactgttattccctaaataatttgattttttgtgacgaaaagttcttactaatttactgaccacaaaatacataaaggccaatgaaatatgaaacatatatagactatagtaagtttgtaacgtccgaattcaaccagatatgataccatttttaatatttccgttgcgttttcttagaatttttttcatatgacatattttactattttatttttgtacatttatttaatttacttaatatctcagaaccttcggaaatgtgtgtaaagtgttccctttttttttttaacaacttgtgtgtaaagtgttcaaccttcagcatttcccctttcttagaatgggctggctaactgccattgaccaaatatttattctccaaaaacagatcttttcattcggcttatttcatttgaataaagtcttttatcaataactaaagtcttgctattaaattaagaataaagagattgaaatgcttatttcattttgattacacattggataagttatgtggaagttctgacctcaatagttgagttctttagtagtgtctaactataattgagtttttttccaccaaattgagttttatttaacatagccacttatgttcacgaaatatttagtttcaagtttttgtatatatactcaatattaggtgcatgtcgattaatagagaagtataaaaatacaaaactcatagcatatatataaaaaccttactaaactgtaactcgataattaatttgttttcgtgttgcatacacataatattcttatcgacccaaattaaaattttcccaactgctctctcctaattgaaaaagtaccaatcctttcttttttattgcctattttacaagtgtttctcatttctacacattatataaacacattcatcttcttcaccatacatgtctctgaccaatattttcatacaacaaaaacaaaaagcctaaaccagaa

SEQ ID NO: 255 - DNA, 2000 bp, Brassica napus
  source 1..2000: mol_type = genomic DNA
atctcctccctcatctcttctttctcttctttgattttattgcaaaccattggttcttcaacgttaacataagacatttgcgaatcttcctcaccaacagacttctcattgtcttctacaacttctgtttctattgctttaggagactcctcgaaatgtggtttacgaccgagaaggtcattgtaaagagaggtcaagataactttgtccttctcttcctcgcgtgtttgtgagtcccattcttcaacttgcattctagcgtttcgtctaacacttctttgttgtcttaagtgacatctaacaccatccttttctcctccacaactctttgatcctgaagatggaaaactcaatcccatcttttctcgggcatatactacaccacaagcaagaaccggcgatgagtatatcaggaagaagaacaatgaaggaaggatgacgtatagtgcaagtaaaaacatggaaacccctgacaagaccgggtgatttctcatgaatttgatgcttgtgttcattgagaatccaagaactttccataatgttgcaccggtctccttcacgtcaatacccattttccatacaatcactattcagcagacgtgatccataagaaatctattgaaacatgatcaatatttgggtgttttcattgcaagatctagcaaagaatgtagcagcatacaaaacgttgataaatggggtttctaaagttagacagattttattgtctggagatcctctgtttcaggtggttttaattttcgcttcatgcttgttttgtataagaggaaaaaacaatgacaaattagaaaaacaaatttagttgttgataaaaaaactagtttttactcagaatatttttcattcattaataaaacggcccagctttaaaaaaatgtacaaatctaattttccaatatcttaagatcagacaagtagattttaaaattaagaaagtaaacaacacttacaaatcaataaaaatcttatgttaagttaaaattttatcaaagcttaaaatagaaatcatgaacaaccaacacaaaaaattctagtaactaaattaataaataagttatatatatattatttagccaaaaacgaaaattaatagaataataacccatataatcctatatactataccaaaaagttagtgaatcttaaggaataatatcatgatttattagattttaataaaggaggaaacgtatttatttgtaaggttgggtgatctaaaattttgactgcagtcttgaaaataatatgggaatatatcttttttgtaactgaggcttatattgggaatatatctttttttttttaacttattaagaatatatcttcaagcataggttttcggaaatattttcttggattagataatagctaagtacttgaaatgtgtatggcattttggattagctcatatttttatcagctgaatctttctcctaggtattctgattttcgagacagaaacttttatacgagtctgaatgtctaatttgctatcaacatatatcatgcgacaaataaaagaaaatgaaaaacaatctttcgcaagtgtgttcttcaagtgttcgactccaagcaaacccaatttcttgtagtaggctaaactaccattgaccaaatctttattctcgaagcaaagatctcattgctaggctcatttcatattaaataaagtattttatttataactaaatattggatattcgatgctacaaaatatcataactaaagccaaacgagacagttaatttgctttcgtgttctattagcccaacccaaaccatacacaaaattcttatcaacccaaattaaaaatgtcccaactactttctcctaattggaaaacaaatgcttttcttgttatagcctatggtaaaaatatctctcatttctacatataaaacaaacccctctccttcaccatatatatgtctcgcaccaatctctccatccaacaaaaaaaaaatagcctaaacccaaaa

SEQ ID NO: 256 - DNA, 2000 bp, Brassica napus
  source 1..2000: mol_type = genomic DNA
acaatgaacgataaaatttttgaactgataccaaaaaaaaaagatacgaagaaacctatcaagttcaaattgaaaacttatgagagataaaggatcacttgttttgcttcgttgagcaaccgaagattgtaaaagagatgtttaacgttcaaaaaaagaagaaaagatgttttaacttttgttgaagctcgtaaataaatttgttgatgattggatttattctataactaaaacacagtttatgtgaaagaagtggagaacgtggtttcagaggaagtgagaaagatgaatattgtgtgtttacgaatcagaaacaatttagagaaaaactgtattaatgatgcatttatttttttctgactaattttgaatcacaagccatgtgacaaagagatacgaagtttgctgatggtttggactttggacagtgtttagacattgtgggcttgtttgtcataagcttcaaatttccgaatccaactttccgtattttctgactacaacctccaaaaattattaacttttaaccaattctcaaaaaaaatccaaagtgcacaactatttattcataaggttgctatattcttatatattgagaaactgggataaacaagtatatatataaaaaaaacaatttgtaacaagaaagtttgtgtgatattatatcgaatgtttaattttgaagtactttgaggattggtgatctgaaattttgactgaaaatatttctcagagctaaactcattttaagcaaaatatttcaattgtggattgactatatcacccaacaaaaccaaaggtatcaaaaagcaaagcacgcatataaaattaactgatcgaattgcgtgttagttgttagttgttacgtacttgttacacacacatatataattaatttaattccaatgaaaataattagttacttttgctatattaagtaagcgaatatttaatatcagtttactttttcatatgtgtatcagatcagtgtatctgtttataagcgaatatttaatatcagttaaagttattccctaaataatttgattttttgggacgaaaagttcttaccaatttactgaccacaaaatacataaaggccaatgaaatatgaaacatatagactatagtaagtttgtaacgtccgaattcaaccagatatgataccatttttgatatttccgttgcgttttcttagaattttttttcatattacatgttttactattttatttttgtacatttatttaatttacttaatatctcagaaccttcggagttcggaaatgtgtgttaagtgttcaaccttcagcatttcccgtttcttagaatgggctggctaactgccattgaccaaatatttattctccaaaaacagatcttttcattcggcttatttcatttgaataaagtgttttatcaataactaaagtcttgctattaaattaagaataaagagattgaaatgcttttttcattttgattacacattggataagttatgtggaagttctgacctcaatagttgagttctttagtagtgtctaactataattgagttttttttttccaccaaattgagttttatttaacatagccacttatgttcacgaaatatttagtttcaagtttttgtagatatactcattattaggtgcatatcgattaatagagaagtataaaaatacaaaactcatagcatatatataaaaacctgactaaactgtaactcgacaattaatttgttttcgtgtttttttttggtaaagtaatttgttttcgtgttgtatagacataatattcttatcgacccaaattaaaaattttcccaactactctctcctaattgaaacagtacgtaccaatcctttctttttattgcctattttacaagtgtttctcatttctacatatatatatataaacacattcatcttcttcaccatatatgtctctgaccaatattttcatacaacaataacaaaaagcctaaaccagaa

SEQ ID NO: 257 - DNA, 2000 bp, Brassica napus
  source 1..2000: mol_type = genomic DNA
aaactgtattaatgatgcatttatttttttctgactaattttgaatcacaagccatgtgacaaagagatacgaagtttgctgatggtttggactttggacagtgtttagacattgtgggcttgtttgtcataagcttcaaatttccgaatccaactttccgtattttctgactacaacctccaaaaattattaacttttaaccaattctcaaaaaaaatccaaagtgcacaactatttattcataaggttgctatattcttatatattgagaaactgggataaacaagtatatatataaaaaaaacaatttgtaacaagaaagtttgtgtgatattatatcgaatgtttaattttgaagtactttgaggattggtgatctgaaattttgactgaaaatatttctcagagctaaactcattttaagcaaaatatttcaattgtggattgactatatcacccaacaaaaccaaaggtatcaaaaagcaaagcacgcatataaaattaactgatcgaattgcgtgttagttgttagttgttacgtacttgttacacacacatatataattaatttaattccaatgaaaataattagttacttttgctatattaagtaagcgaatatttaatatcagtttactttttcatatgtgtatcagatcagtgtatctgtttataagcgaatatttaatatcagttaaagttattccctaaataatttgattttttgggacgaaaagttcttaccaatttactgaccacaaaatacataaaggccaatgaaatatgaaacatatagactatagtaagtttgtaacgtccgaattcaaccagatatgataccatttttgatatttccgttgcgttttcttagaattttttttcatattacatgttttactattttatttttgtacatttatttaatttacttaatatctcagaaccttcggagttcggaaatgtgtgttaagtgttcaaccttcagcatttcccgtttcttagaatgggctggctaactgccattgaccaaatatttattctccaaaaacagatcttttcattcggcttatttcatttgaataaagtgttttatcaataactaaagtcttgctattaaattaagaataaagagattgaaatgcttttttcattttgattacacattggataagttatgtggaagttctgacctcaatagttgagttctttagtagtgtctaactataattgagttttttttttccaccaaattgagttttatttaacatagccacttatgttcacgaaatatttagtttcaagtttttgtagatatactcattattaggtgcatatcgattaatagagaagtataaaaatacaaaactcatagcatatatataaaaacctgactaaactgtaactcgacaattaatttgttttcgtgtttttttttggtaaagtaatttgttttcgtgttgtatagacataatattcttatcgacccaaattaaaaattttcccaactactctctcctaattgaaacagtacgtaccaatcctttctttttattgcctattttacaagtgtttctcatttctacatatatatatataaacacattcatcttcttcaccatatatgtctctgaccaatattttcatacaacaataacaaaaagcctaaaccagaaatggaagccttaaaccctatcttaaccggctacgcagtggccgctctatcgctttacgctctttggttctacttcctatcccggagactaaccggtcccaaagtcttacctatcgtcggaagcctaccgtttctaatcgctaaccgtaaccgagtccatgactggatcgctgataacctccgagccactggcggtacgtataccaaacaagcaccatggtgatacctttcgtggcaaagacgcaagggttttacaccgtgacgtgccacccaaaaaacgtcgagcatattcttaaaacaaggtttgataactacccgaaaggtccg

SEQ ID NO: 258 - DNA, 2000 bp, Brassica napus
  source 1..2000: mol_type = genomic DNA
ctcatctcctccctcatcctttctttctcttctttgatcttattgcaaaccattggttcttcaacgttaacataagacatttgcgagtcttcctcaccaacagacttctcattgtcttctacaacttctgtttctattgctttaggagactcctcgaaatgtggtttacgaccgagaaggtcattgtaaagagaggtcaagataactttgtccttctcttcctcgcttgtttgtgagtcccattcttcaacttgcattctagcgtttcgtctaacacttctttgttgtcttaagtgacatctaacaccatccttttctcctccacaactctttgatcctgaagatggaaaactcaatcccatcttttctcgggcatacactacaccacaagcaagaaccggcgacgagtatatcaagaagaagaataatgaaggaaagatgacgtatagcgcaagtaaaaacatggaaacccctgacgagaccgggtggtttctcatgaatttgatgcttgtgttcattgagaatctaaaaactttccatattgttgcaccggtctccttcacgtcaatacccattttccatacaatcactatctataaacgagatcgataaaaaatctatagaaacatgatcaatatttgggtgtttttcattgcaagatctagcaaagaatgtatagcatcacacaaaaagttgataaatgtggtttctaaagttagacagcttttcattgtctggagatcctctgtttcaggtggtttgcattttcgctccctgcttgttttgtataagaggaaataaaaatgacaaaccagaaaaaaacaaaattagttggtgataaaaaagtagtttttaattactctggttatttttcattcatttttaaaacggcccagtttttcaaaaaaaaaatctacaaatccaattttccaaaatctttagatcagacaagtagattttaaaattaagaaagtaaaaaccacttacaaatcaataaaaatcttatgtaaagttaaaattttatcaaaagttaaaatataaatcatgaacaaccaacacaagaaattctagtaactataaattaataaacaaataatatattatttagccaaaaacaaaaattaatagactattaacccatataatcccaaaagctagtgaatcttaaggaataatatcatgatttattagattttaataaaggaggaaacatatttctttgttaggttgggtgatctgaaattttgactgcaaagagttttggaaaaaatattggcaatgtatctttattttttactgaggcttatattgggaatatatcttcaagcataggttttctaaaatattttcttggattagataatagctaagtacttgaaatgtgtatagcattttggattagctcatgtttttatcagctgaatatttctcctaggtattctgatttttgagacatatacaaaaacgaacatggccaaacttttatacgagtctgaatgtctaatttattatcaacaataatgcgacaaataaaagaaaatggaaaacaatctttcgcaagtgtgtttttactctggaagtgttcgactccaagcaaactgaatttcttatagtgggctaaactaccattgaccaaatccttattctcgaagcagagatctcattgctaggctgatttcagataaaataaagtattttattgataaataaattggatattcgatgctcaaaaaatcataactaaattcaaacgggacagttaatttgctttcgtgttctattagcccaacccaaaccatacacaaaaaattcttatcaacccaaattaaaaatgtcccaactactttctcctaattggaaaacaaaatgcttttcttgttatagcctatggtaaaaaatctctctcatttctacatataaaacagacccctctccttcaccatatatatgtctcgcaccaatctctccatacaacaaaaacaaatagcctaaacccaaaa

SEQ ID NO: 259 - DNA, 2000 bp, Brassica napus
  source 1..2000: mol_type = genomic DNA
aaaacatcattaattatttacctaaccacagttgaaccaatagaaaaataaaagatatattatcattgatcatacaacattaattactaataaattttacatagaaaaccgaaaacgacatataatttggaacaaaaaaatttctctacaacgacttatattaaaacacggagggaatatatgacaaatgagaatataaaattttaagtgattaaatgtcaaaaatatatgatggtaatggaaattttgaatgcctgaagaaaaatcctttgatacaaaaagaatatttaaagaaaaaaacaataatgtcttccattcttccgaaaacatgcctctaaatgtttaaatggctgattaaatagctaaaaatgaattttcgtacggctatttccaaggccggcttagatagggggcgagtagtgcgacagttccggatccaatccgttgtccctctattttttaatagataagaatccgacttttttaaaaaaaaatacatgtatttttatactaaaaataagaaaagaagtccaaattttttatatgaaaatatttttttgtttccatagatttatttttaaaaatacttctggtattttgaaaaaacatatatatatcagattttctaaagaaaaataatagtttggaaattaaaaaaaaaatttgccccagggcccatgacaccattgagccggccatgcctatttcacagtctttttgaatgcttgcagtcttaagtattttaagatttataatttataacttcacatattcagttgaattcgaagatgaaaatacacccattacacatacgttatatgcttatatttatccgtataatatatactgtgtgtgtatgtgtaaaagaaactctaagtcaaagaacaagagcttctagaataaatttgagagataaataatcggcgtagacatggaaataaatgtactttgaaatgaagtcaaaacttatatggcaacgagtcataaccgtatctattatatgacaatatggtcttctcgataccgacgtttttcctcacggcacacgcatttcatactcatcatattacatcctcgattaatttcttagaaacttcttcaacctgcagaatttctacaattcattacacaaaaaacgttttattgaaacggaaaactacgtacggagtgacaaagtttctttaattgttatcactaaactggtgcaatgatggaattgcatggttggcaaaaaactatggaaacacattgtactatatatcctgccgttctatgatttaatacagtaatactcaatgttcatcattttctcacagaaagttatatcatcatttcttgtttgaagtttcttactgaggccatgcaagttccaaaaattctcttgttttttttactcagttctgtcataagaaagtcaagaatttggattaccttttctcatataagttgacttattcaaaccactatctatgaataagcaaattatccaaatttaagaagtacatcagaaattaagtgataacgcttgattggctacaaaagggaacatttcaacccaagtcacgacaaatcaagaaactatataattgctacatattaattaaaatatataaagtgctatgcaattggacaaattttacgcaagtttttcttttgtataatgatttaaaaactgagacagcttttcacctttcaaataaacaagtaattgttagaaaactaatccaaaagcaaaaaacacaaaaaccctagtaagaaaaatatagttgctaagggttgaatttgaaatatgaaaattaaaacacggagacgactttatataataagataatatttactttttagttataataatcactaattaataccttcctttttcttgtctttataaaccatctcttctaagcattagatcatttcatcttcatcaagcataataacactttggaagaataagtacaacaacaagaagaagaaaagacaaaaggatttgtaagaaa

SEQ ID NO: 260 - DNA, 2000 bp, Brassica napus
  source 1..2000: mol_type = genomic DNA
tctcacaaattccgatatctctattatacctttcatttcatctcttttggtacatatcaataactcatatccttttcaaaagggtaatattatattaacaagtgattcatcgatcatgcaccaaatcctatatatgtttggtgatgatttttgacagttaatttcatggatttgattatttatcttgaatattttggtatactatagataagttgtttgtatgtatcaaagagcgtttagttacaattaattaacgaacagcaaaggacgttatacgatgctactcttttgttaaatccacgcttaattagttttgatctaagaaaactttgtatgccaaaagtttttttattggtaacgacgatggtctacatcctttagcgaacttcaaatataataggcgatacatgaaaataccagtgttctcatatattattttcttgagaagtattaatatatattttgatgagtgagatgttgttcaatacgagtttctgtatatttatatttttagatggttcacacatttcaatcaccaaacattcgaagtatttgtctctatctcgacaacatgtatatactcctctgtactatatatactacaacatcaattactaaaaatatattaataatgtatataatcgtacgtactacgtacaagtctcattttgacactaattgattcaatttttgaaaatattgaattattttgttactcttgatgaccaagtctatcacatgcatgtaataaaagtacacataatcggtctttcttcttattcgtaagctgccatgcaagtgggccttcaagcttccgtgaagtcttatgtaataattacatacacacgcacacgcgcacacacgctatatataagtatttatgtatatgcatattaattaatccatatgtaactccattataatcaaatcgaaggtatttgtgattttgcatgccatttactatttatgttaatcatactcctaaaccgcagatcgaagactaaataataattataaaatccattactcgctaggacatgaatcatgaggaaaagctatatatagcgtgtaatatctaatgatatgcttgttgctccacaaaaaaagtgtgtaatatcatacaataatcatacatgtttaagcgtacattttactagcaacacagaatggcggataaaatataattacaataacttttgatcaaaataataataattattataataactaactgcaaaaactctacagtgataacacaacgattaatttccactctttcaaaaaaaaaaaactcaaaagtgattataaatttagaactagatgcaactcatacaataaattacaaaatatatttcatagttttcaatcttgctcttccatccggaaacttatttagtaataaactgttctgaagttagatgaatacagcctaaaatcgagaatatagaaggaagagacaaaagagtcaaagggtggcggccggctaagcattataattgacggggtgttttacatataattggtggggtttataattaacaaattttccgtaagactaaatatacttcattagtattgaatctctagatgctgatgcaggagcaaagacaaatgagaaaaaacattagtctcccccttctctgtcattcatttctaaattctactaatattttatcacataatttatatcattaaatttccaattccataaagtaacttttattcattttttaaaccctaacttttgacatcttcatcacaactatctcctccagctattatatactatctcctttaattttttcttcattcacatatacttttctccattatacacatttccaagtatgtatatataaaaacctcacatacacgcaccatcacacaaacatcctcctcctcctcttcatcatcaacatagttgagaaagataaaaaaaataaagagggagagagagagagaaagaaacacatcgagagaaagaatcacgaatcaagagg

SEQ ID NO: 261 - DNA, 2000 bp, Brassica napus
  source 1..2000: mol_type = genomic DNA
ttttaattaattgtcgttgacctgattcatgcaaagtaattttgatatatatattaaccattttagcggtatatctaattatggttataagaaatttaaattaatttgcaaaggaaatctagataaatgacatctgttaaattactattagcaaataacgaaatggtacctaaaattaaaaggcttatataagaaatttaatgcatgatttagttgatagtactttcaaaattgttttcattgagtatttttgtagatgcttttaacgaaagttaacatacacgagggtataaaaaaattaaaaacaaatgtcaaagttgcatggcggtaatggaaatccgtttagttttttaatgtctaaagaaaatttctttaacaaattaaaaaggaatgttaaagaaaaaaatcaaacgtggttacctaaacaagacaaccttcaaaatgatcagatttgttgattaaatcgctaaaactgaactttcttctgatatgatcattgtttaagcgattacacttctgaacattttcatattttcatatttatatatttacgtattcctattagattctatttgaagttgaaaatacacccagtgcatctatattatagcatccatataaactatatatattagtatagtgtactcgtatgtgttattgtgcatatgtgtaaaagaaactataagtcaaagaacaagagtttcttttttcaaaaaaaaaaagaacatgagtttctagaatcaaactaagaaagaaataaacggcctagacatggaaataaatgcttactttgagatgaagtcaaacttattttgcaaggagtcatataacagtatatgtttggtctttctcgatatcgacgtttctccttacggcacacgcattttcatactcatcatgttacatcatcggttaatatcttagaagcttcgtcaaactgcagtttctataattgagcactgagtgtttttaacagagtcagtaaccaagaaacgttttatttaaacggaaaactacgtggtgggtgagagttgcatggttgaaagaaaaaaacacaattgaaacacattgtattattctgcctttctatggattgataattataattattactgtcttacttctgctagttcacgtacaatatatttacttataaacagaatcccaaataatgtcgcaggggtttggtaagtagtcttactagtaagaatttattatttttctcaaattctttagtcaagaaaaatggtactcaaatgttcatatttttcttctaagaaacaaaaaatttaacatgcttgagtttcttatttaggccacacattatgcaagttctgaaaactctcttggctatttactcaaaattttctgtcataagaaagtcaagagcttgtataccttttctaacagaattcacttattcaaaccattattataaagttaagcaaattatccaaattcaagaggtacgtcagaagttaaaaataactaattagcgatgacatttgattggctatagaggggaacatttcaacccaagtcacgacaaatcaaggcgatggttttttcctgccctctaatttgatcagttaattaaaatatataaagtgctatacaattggacacaatttcacgcaagtctttctttgcgttaatgattattaaaactgagacaactttccacattttttaaatagataaagaaagaaaggttagaaaactaatccaaaaagcagaaaaagcaaaaaccctagtccgaaaataatacaattagggttgaagttgaattatattaaaataaatagaaggccgagaagactttttttataaactttattattacattttcagttataataatcatcaataacaccttccttttctcgtctttataaaccatcccttctaagcattagatcatttcatcatcatcaaacataataacacttcgaaaaagaagagcaacaagaacaagaaaagacaaaaagattcgtaagaaa

SEQ ID NO: 262 - DNA, 2000 bp, Brassica napus
  source 1..2000: mol_type = genomic DNA
actttgcacgaattgccaaaagaaacatgaatttttgggctgaccagaaaaacaccaaactttcattgactttagaattaattaacaatgttttcgctgacttgccaatttagcacaccgtcaacaaatttaacagattaagtgaaacgacgtcgttttacatgatttgaaatatgtagtccccaggattcaaactcaggttggttggtcaaatgacaaggtattttaccactgggctactggcactttcaatgtacttactaacatgtttatttttatttggtacatattaaatataaaaaattctctgaaaacttaataagatctttaaaattccaaaaaaaattaaaaaaataaagaagatttttataaaattaatttagaaattaaaattaaaaataattttttttttatttttaaaaaataaaaactcttccacaattttctaaaaacttaaaaagatctttaaaattccaaaaattgaaaaaataaagaaattttttataaaattaattttgaaattaaaatagaaaataaaattttattttttcttttcaaaaattttttttttatttttcttaaaaaaaataaaaaaatcttccaaaattttcataaaattaattttgaattaaaattaaaatattttttttctttaaaaaatcaaaaaaattccaaaattttcatttttaaaaaaaaatccaaattttttaaaaattataataaaatgcaaaaaattaaagttacaattatcaactttttatgcgtgtataattaatttcaacttttagcaaatgtattatggaagattttttattttttgaaaagaaaaataaaattttattttctattttaatttcaaaattagttttataaaaaaattctttattttttcaattttttggaattttaaagatctttttaagtttttagaaaattttggaagagtttttattttttaaaaagaaaaataaaatttatttttaattttaatttctaatttaattttataaaaatcttctttatattttaaatttttggaattttaaagatcttattaagtttttaaagaattgtttatatttaatatgtaccaaataaaactaaacatgttagtaagtatattgaaagtgctagtagcccagtagtaaaatactttgccatttgaccaaccaacctgggttcgaatccaggggtctacatatttttaatttcaaatcatgtaaaacgacgtcgtttcatctcatttgaaaacgacgtcgtttcacttaacgccaacaataaacgacgtcaaatatttttttaatatatatttgtaaattatgcagttatatgtgtatatgagatgtaatttctttaatagatatttgggtaattataaaagaaaattatgaatgatagacaataatcctaaatctgcagaagtaaaactgtaaaccatgttggtttgatttaatttactgcagaccaaaaacctgtggaattcggtcgataaggggacgtcaaaggaaactttaacccattagtccaattttttccttcgcaaaaccatttgtccaactttttgaaaaatatataaaaataaaagagcattgaatcactagattaattaaagttattaatttcgtcttcaagaattgttaacaaaaaatctccactttgaccacttaaaccagctgtaattgttttgctttggtgaccaaaaaaacacacactcatttttatttttatacaccgcgctctctccctctctctccaatatactaatgaagttaatccacatgtggagaagagtaaaaggcttatggaaagaaaaataaaaataatttttttcattgacttgggcgtttcctatacatatgcaataaatatgtctttgtatttgataattacagaaccagagaactctttttctttctcttcttctctctttcaaaaaacaaaccaaacttcctcaagcaaaacacatagattagctaagaactgagagagatcggagagag

SEQ ID NO: 263 - DNA, 2000 bp, Brassica napus
  source 1..2000: mol_type = genomic DNA
ataatatacctttgtatggttctttagtcaataaaaagtaataggactagtattttaagtacattgtttatcctctatgtataatatacggattgaaagctagtatttaccagatagttacattacatgtaaataattcataattgtaagggttaacacttaacatcttaaagagattttccattacaagtctgcattcacaagattggtaggcacttatttgagtggaacattatgatagaggcctattatatgttactaaaagacctctttatcaattattgatccatttaataaaatcttaatatagatagatttcgacctttcggtataaccatgaagtcactgagaaatgtcttcgggtagagactccatcgcaacaattaggttagtaattttaatgtgtatattatatataaaagaactcgttgcaatgcttttaatttaaattagttaattacaactggatcagtctactgttataatatattcatataagttataaccgtgttatagagctaaaaaacatacaattcacaagttgaaaactaatatcacacatccatttcgtggctagcaataatgaaggctagctaagtagacagcaaacaactgctattaggtatatgaagtgtgttactattaagttagtggttgtgatcagtcctaagcgagtttactgacttgagaagtaaagtgagtgtgtagctatgtaaaataagaaatgagtgtagactgatccacttgtaattaactaatctaaaacccttaatattgttttgaaaattaaagtggcacaccaacttaacaacttaaaccgctggcccatcaaaattaagaaaaaaatgtcgccactgaatctgtgtaattacagaacacacaagcatgctactaacagaaatacacaagtctttatgtgaaattaataaatgcttaatgtattatacatatattcctcccataagaataatagtatgtcattgtggtgcctcgcgatcaatcactttgacaaagtcttatgggaaatgacttagtcaaacatttcacttgtcttttggaaattaagtacagggtcacagtcatgctttctctactttttggtttaatgtcaacttctcttttattttattttgtttttttcttatcactagtctttgaacaattatttccttcttattggggtacagtgtgccaagaaaattaataccatgcatgaaaatggttgactataaaatctgcatacacgcaccattttcatatataatagtatatcttaccagactttcggataccatatatatatttgattactgtttgaatatatgtaatactttatatcaaacaaagccatcctgtatctgttagttatttagttcatatatccattaattattactaatcttaaatttgcaaaagcaaagctgaaaatcatgttgtttctggttggtttggttcggtttaattcaatgctggccaattttaaaaggttgattggtatcttccaaagacaaacacgtacattcaatcgaaatggggacgtcaaaggaaactttaaaccattgtccaatttgttttcttctacgaaccatttttccaacttcttaaaataaatacagaattattaatttcgttttcaataatcgttctttatttctccactttcacaacttagaccagctgttattgttttgctttggtgatcaaaatgcatgcatataagtacattgtttatttctctgcctatgtatatattatagtaatgaaggtactccacatgggaagaggaggaaaaggcataatgggaagaaaatagaaattaggtttttcattgacttgggcgtttccaatacttttagcaataaatatatgtctcactctttgataattatagaaccagaaaacacttttctttctcttcttccctcttcaaaatacaaaacaaagatccctcaagaataacacatagattagctaaggaccagttgagagatcagggagag

SEQ ID NO: 264 - DNA, 2000 bp, Brassica napus
  source 1..2000: mol_type = genomic DNA
gatatttctaaaaatttcaaatttgtaactgctaatttattaatagaatcatatatctatattgaattatgttctatttttaatcgttactttaagagtaaataaattattaatttataatatatatatagtttataactttatattgtagttataaataaagagaaaataaccgggaaaggtgaagaagctcataaaaaattatgtaattaaaatggtaaaatggtgaatatgatgaagtgaatctaagaaaatttgttgtacaaattatggtgctttcttcgtccactatcctactatataaaagggactaaattcaaggcttttgagactatccacctcagccaaaatattctcatccaaaaagaattaaaaataaatgtcatttagaagataattaactaatataaaacttttgatatttctaaaaatttcaaatttgtaactgctaatttattaatagaatcatatatctatattgaattatgttctatttttaatcgttactttaagagtaaataaattattaatttataatatatatatagtttataactttatattgtagttataaataaagagaaaataaccgggaaaggtgaagaagctcatataaaattatgtaattaaaatggtataatggtgaatatgaagaagtgaatctaagaaaatttattgtacaaattatggtgcttttttcgtccactataatgatttaaaataatatatattcatataaataagtcaatatttgttgttttttttgtaagatgttaagattatcattttctgaaatgttacactgatccaaagagattagtttgtggagctaaccaaacgaggattatagtgtttactttggaaaaagtaataggttgaacgatagatggcgtgcgtgttttttcacatggaaatctgcacatatattaaaattgtaaggtttgaatcatagagaaaatatagtgtatatgactgaagttgattcattccgaaactaaagatagctaaaattcttctttgtcaaaatgcatagatgtgaatcttatatgaatagagttttcaattgcttatagcagtgtaataaattccgtgtgtaaagaaaaaaaaatgttatataagtgaaaacaaaaattatgatttttttcttgtgcctataggctcttcgcaatttgaagaagaaagaacatattgtgtgaaaatctttggctcggtcaaattttatcgagttgtttataaaactgttgttatatgattcatgtaaattttcagtgttgatttaaaagcccaagaaaactcatctatactaactttttgattttttctgtgatttaaatttaaaaaagataaaactttcgataagttatgtaaactcagaacaagtatttaactttagaaagcatttacatgtttcagacttataatatatacatatataatgtttaaaattatgtatataaaacctgtataaaatgtgcttaaatatgtttctcttctttaatgtgttaattgtactatatataacattattttaaaatttcaaaaagtttatgtcacatacaaaaaccatcaataaaaaatataattctccatctacaaccagaaaaaagaaaaactataaacatataaatttaaattaagaaaaactaacattggaaaaacaaaaaattaatgtaaaagaaacaaaccgacaaataatattataaataaaataaatttataagacacaatccgcgcgaagcgcggaaaaaatctctagtattttataataatgaagttaatccaaatggggagaagagggaaaggcataatggaaagaaaatagaaaataagttttacattgacttgggcgtttccaatacatatagcaataaatatatgtcttccacctctgataatttttagaaccagaaaacacctcttcttctctcttcaaaatcaaaactaatattcctcaaacaaaacacagagtagctataaggaccgagagagatcgtagagag

SEQ ID NO: 265 - DNA, 2000 bp, Brassica napus
  source 1..2000: mol_type = genomic DNA
tgcatttcgaagtaagaaatgattctctttattttttatttgtagattacgagaaaaaatccttgatcttttaaacgaaagtacaataagcaggaaaaaaggtcatgagatgattgaattacgactgcaaaatgaagcaaaaaagttagcttttaaagaaataaaagaggaaaataaattattgctaaaaaacttagcttctatcaatgatgttaatattcgtgaatacattcgatctgaacaagaaagaatcatacggaaaatgcgtcaagagcaacaacaatcatcttcggttacacaaaatttgttgaacaatattttggagattttggaggttccggagcaaatttaccagactattagtgttgttataatatttaaatttgagtaataattatgtcttcatgtgtctttttaataagtttttattatgggtttttgtaatattcttgttgtttaattctagttttaaaatattataaatcttgttttaattttttttattcaatttcatgtgtaaaacttaagtttatataacaaatttgaaatatttatgagacataaaagttttaaggattaaaacaataaacaaaaaaatatttaagaattataaatatgatgtataattgtaaggaccaaaatgcaaataaaaagatgaaacttcaaatttgaagttttgaagttcctttttggagagcaaaaaactctatatttggagttatagagtttcttttggagatgctctaaaggacacattgcgtgttttattttcacctaaagacacattatggatttgagacactttattattggtttttgttattggtttctattattgttggtttttaattcattatgacttagaccaaagaaaaatcgttataacaacgattcatattattaagctgttaaaaaaaagttatagttgatttagtcagagacagagataaagataaagaaaaaaaaaaaagagattggttcttatgcagaaagaaaaatatacaggggatgattggtaatgatggtagaagctgtggacagcatttttaatttttagaaccattttttaaagcaattatgattttttttttcagaaactgtagacagactttaaatttctacagtcatttttaaaagcaatcatgcttttatttttaaaattgaattcaaagccaaaatattaaaatagaaaatatattagctttagaaaacaatttctctagagtttttatttagtgctctgaaaaatttctacagcaaaataaatgaaaaccaaagctaaaaatttaaaacctaaatcttaaaacaaaaaatcgaaagctacagcttcaactaatcaaactcgtatttagttgatttagtttgagggtatatgagacattatccatgtataatgtgctttctagctaaaagtgttttattttgtaattggaaacacataatatgtctttgagaataaatatttctaattttttagttgtatatggacgggagtaaactataattcagattaaaaatttactctatagataccagcccgtttacagccttggagaaaatgttcaaaaacaaaaccattgagaactttttttaagagtacaaatagtcttcgttatcttctctgtctttttattttattttattttatttatttcactgttgtatagtatttagttatgttgggtttaatatttttctaatttccaaaaagtaactttttcattttcaattttaaagagattcctactttttgacatcttttcttaggaagactttttgatatctaccatcgtatgacagtacactatctccagctattatatatcctcctttctttcttctctgctttcatataacatttcccctataatcacacacacatccacaccatcattcccaccaacattaaaaaatcttgattacagagagataatagagccataattcaagaacaagacttatatttagaatcggaaagcatacttctcaccaggagagaa

SEQ ID NO: 266 - DNA, 2000 bp, Brassica napus
  source 1..2000: mol_type = genomic DNA
gaatatttatgttggatattttgatatactgcggatatgtctattcgtttttatccaggacatgaacgttttgttcgattggcgaatactagatgctattgctactcttttgttaaattattcatgctttgttttgatctttgatttgatctaaaaagatatgcatgttaatgattttttttaattggacgatggcctatccgttatcaaattatcagaatatagtctcttttttttttgaaaaaaactatcagaatatacttcagctagacgatacataaaaaaatcaaaatagcagtcttctcatgtacttattcaagtggtatatatatactgatattgaccagtgagatattgttcaataggattttttgtgtgtatataaatggattataaattcttagttaattcacacatttccatcaccaaacattcgaagtatttgtctctagctatctcgacaacaacatataatacaatcatatatatgtactatactacaaaatcaattactagccaatacattgactctgtatatatacgtacgtagtacatacaagtctaattcagtcacttattggttcaaagtttgaaatattgaattatttcattattattgatgaccagattttgtctttctttctttttggcatcgaccaggtcttatcacatgcatgcaataaaagtacacataaccggtctttctttcctattcgtaagttgtcatgcaagttgggcttcaagctttcgtgaaatcatatgtaataagtttaataatgcaaaaaaaaggtgtaacaatgcatacacatagtacatatatacataaaatagtccattttcactacattataataattgattaaaagtatttgcaatgttgtagccattgctatacatttatatttttttgccaaaggatttactatttatattagataagtaaatcatactccttaaggacctaaactgctgatcagatattataaaagattagacaatattagtattctcgctaggaatgaaattctatagcgtccagtatcataaaataattattattattatgcgtataaaattactagaaatagaaacatagaatggcagaattaaaaaaaaataacagacactggaagtaataaacattgataagacaacgattaattttaacataaagcagcagtggcctatgtaggatacatttccgagttctgtataatatatctatttttagacaaaagaataaaaaaatgattataaactgataatttaatgcaactcaagcaatcatactacaaaatacattccatatatatccatcttattatttcaacttagcaaattcattaaaaaaaatttaaatagatcatccatattaatggaatgtaatacaatattatcaagttatatgatcacagcctcaaatcgagagttaagggagggaggatttgggggaagagggagtaagagacaaagagtcaaagggtgggggcggctaagaaaacattatcatttatggtgtttattgttacacatatatatggggatcattaggaaaattatcttaacacaaaatagatttcttaattaaattaataataatattgaatcgatctagatgctgatgtagaagcaaagacaaaggagaaaaacactagtctcccccttctttgttatttctaaatcctactagtattatatcacataatttatttcatcaaaattttcaattccataaagtaacttttgattcatttttgtttgttttaattcctacttttgacatcttcatcacatgaaggactatctcctccagctattatatactctctctcttctttttattttcttcattcacatatacttttctccattacacacatttccatgtatctatatataagaacctcacacacacgcaatcacacaccatcctcctccttctcctcatcagcataactgagaaagagagaaagatacaacaagaataacgaatcaagaag

SEQ ID NO: 267 - DNA, 2000 bp, Brassica napus
  source 1..2000: mol_type = genomic DNA
ggcgttctccgcttcctcccccttccactcatgctctttcaccttcaccccgcgggcttgtaatgggccagcggattttttagctaaatcatgtcttgtttcttatttgggcctgaggccataactctctttgtttgatttagttctaatgaaagtaaccagttgatcaaaaaaaaaaaaaaaaaaaaaatgagattgtgtatataaaatgaacaataaattttctatttgtataacacattcctatcaccaaacattcgaagtacctgtctacattctacaacatataatacactcctttgtactatatgtacatgtgtacgtaatacatacatgtctaatccagtcacttattggctattgttgatgaccaagtctatcacatgcaatgaaagtacaagtaatcggtctttctttctttttcgtaagctgccacgcaagtggggcttcaagctttagtaaaatcttacgtaataactatatatatacacttccgactgttatgcatattattagttaattcgtatttcgttccacaatatatagatgaatttgacgtatttccaatctttgcatgccatttactatttatgttatactgtgttagtgttttgtgtggtaaacatactgtgttagttaatcacacgaccctaacggcgtatcagatatgatcaaaaactaaatgatataaaaagtaattctctacttgcaatatagaacatgaatcatgatgaaatccagtgccgtgctaaaagttttaggggcgtaagacaaattttaaaaataaatttatttacaactgtaataaaaataatttttaatacaatatattagttttacaaaatacacaagtttaataccgtaaaataataagtttattacatagatttagaaggtgagttagtcgactctggtagaaatattttttttttaataaatctaaaccactaaattagaaagtattttaaattttgaaatcttaaaaaagtaatattaattatagacttaagacgaatgcgtttttttaataaaatatatgcacacctctgatgaaacctataacggtgtaatatcatacatagagacgtatacatttactagacatagaatgacggaaattaaaaagataattgactgcaaataaaaaatgataacatagcgattacttttcaacattagactctagcctatacagtatacatttccgaattccgagtctaatatatatatatatatatatgtttattgttttcaaaagtcaaaagtaaatataaacttagaattagatgcagctcatgcaatcatattacaaaatattttatacatgtccatcttgttttcaacttagaatttgttcacgtttattaaattgatttttgttttaaatgatcatccataatggaattgagaaacatgtttgacgtgaaatgggcgcatcctaataaaaatcgagaataggaaggacaataaaaagagtcaaagggtaacgggcgccgggcagctaagaaaacaatatcggtttatgggggttgtgattaaaaacattatagcaaaaaaaaaaacattttctttttaaattagtaagatattgaatctctagattctgatatatgagcaaagacaaaggagaaaaacattagtctcccccttctgtgccacctataaattctaacaatatcacctcacaatatatatcatgaaaatttcaatccataaagtcactttttgattcattgttattttaatcccttactttttgacatcttcaatcacatgaaggacaatctcctccaggctccagctattatatactcgatctccttttcattttctacattcacatatacttttctccattacacacacttcaattgatgtatatataacctcacacacgcaccatcacacaccatcatcctcctcctcttcaacatcaacataattgagaaagagagaaagagatacaataagaataagatcaagagtcaagaatcaatacg

SEQ ID NO: 268 - DNA, 2000 bp, Brassica napus
  source 1..2000: mol_type = genomic DNA
aatcaaaaaaatcaaaattttataatattatctaaaaattagtaacttaaattttcaaaattagcattttttaattttttttttgtaaatatatgagtttgatgtgtttttaaaatcaacattatatatgtataaattaaaaatgtaaaaatcgagaaaatataacaaaaattatataaagaatttagacgtagtaagactttcttccctaacttccggatcagacatattccaaaagcacaaaatactatggcggacaagcttgcaagtggtgcgaggagttctccttcagctatgttatatgtcgattcaatactttcggtttggctttctgaatcgcgcggtccagttacttagttctcgcttatgttgtcaaaaaaagttactaatttttaaataatattataaaattttgatttttttaaaaaaattttaatggtaaaacccctcaactatgtttacttaatgtaaaaacctctaaattaaagatttaccggtagtaatggtaattatgacctgttagggtttaattcattaaataacgttagtttgagggttttttctttaaatacttagtttgagggtttttacccaaaacaaacttagttgaggagttttaacgttaaaaatccaagaaaaaacaataatgtcttccactcttccgaaaacatgcctctaaatgtttaaatggctgattaaatcgctaaagatgaattttcgtatggctatttcacggcctttttgaatgcttgcagtcttaagtattttaagatttataatttataacttcatcatattcagttgaattcgaagatgaaaatacacccactacacatacgttatatttatccgtataatatatactgtgtgtgtatgtgtaaaagaaactaagtcaaagaacaagagcttctagaataaatttgagagataaataatcggcgtagacatggaaataaatgtactttgaaatgaagtcaaaacttatatggcaacgagtcataaccgtatctataaatgtacttctcggtaccgacgtttttcctcacggcacacgcatttcatactcatcatattacatcctcgattaatttcttagaaacttcttcaacctgcagaatttctacaattcattaaacaaaaaacgttttattgaaacggaaaactacgtacggagtgacaaagtttctttaattgttatcactaaactggtgcaatgatggaattgcatggttggcaaaaaactatgaaaacacattgtactatatatcctgccgttctatgatttaataatactcaatgttcatcattttctcacagaaagttatattatcatttcttgtttgaagtatcttactgaggccatgcaagttccaaaaattctcctgttttttttactcagttctgtcataagaaagtcaagaatttggattaccttttctcatataagttgacttattcaaaccactatctatgaataagcaaattatccaaatttaagaagtacatcagaaattaagtgataacgtttgattggctacagaagggaacatttcaacccaagtcacgacaaatgaagtaactatataattgctatatattaattcaaatatataaagtgctatgcaattggacaaattttacgcaagtttttcttttgtataatgatttaaaaactgagacagcttttcacctttcaaataaacaagtaattgttagaaaactaatccaaaagcaaaaaacacaaaaaccctagtaagaaaaatataattgctaagggttgaatttgaaatatgaaaattaaaacacggagacgactttatatatataataatatttactttttagttagaataatcactaattaataccttcctttttcttgtctttataaaccatctcttctaagcattagatcatttcatcttcatcaaacataataacactttggaagaataagtacaacagcaagaagaagaaaagacaaaaggatttgtaagaaa

SEQ ID NO: 269 - DNA, 2000 bp, Brassica napus
  source 1..2000: mol_type = genomic DNA
gttccggttcggttcggttccggttcggttcggttatttcggatataaaaatataggaaccgttagagtattttagggtattggtccggttccggtttcggatatttcggttcggttcttcggttccggttattttgcccaggcctagattcatcgatcacgcaccaaatcctatatatgtttggtgatgattttggacatttaatttcatggatttgattatttatcttcaatattttggtatactatagataagttgtttgtatgtatcaaagagcgtttagttacaattaattagcgaacagcaaaggacgttatacgatgctactcttttgttaaatccacgcttaattagttttgatctaagaaaactttgtatgccaaaagttttttttattggtaacgacgatggtctacatcctttatcgaacttcaaataggcgatacatgataccagtgttctcatatattattttcttgagaactattaatatatattttgatcagtgagctgttgttcaatacgagtttctgtatatttatattttctagatggttcacacatttccatcaccaaacattcgaagtatttgtctctatctcgataagtatatactcctctgtagtctatgctatatagactacaacatcaattactaaaaatatattaataatatatataatcttacgtactacgtacaagtctcatttagtcattaattggttcaaaattttgaaaatattgaattattttgttactcttcgtgaccaagtctatcacgtgcatgtaataaaaagtacacataaaagcattattatcaaggatttcttagaacggggcgctggataataatgctctaatccgtgaagtcttatgtaataattacatacacacgcacacacgctatatataagtatgtatgtatatgcatattaattaatccatatgtaactccattataatcaaatcgaaggtatttgtgattttgcatgccatttactatttatgttaatcatactcctaaaccgcagatcaaagactaattataaaatccactactcgctaggacatgaatcatgaggaaaacctatatatagcgtgtaatatctaatgatatgcttgtttctcgacaaaaaaagtgtgtagtatcatgcatacaataatcatacatgtttaagcgtacatttactagcaacacagaatggcggataaaatataattataataactaactgcaaaaactctacagtgataacaagacgattaatttccactatttcaaaaaaaaaactcaaaagtgattataaatttagaactagatgcaactcatacaataaattacaaaatatatttcatagttttcaagtcttgctcttccatccggaaacttattcagtaataaactgttctgaagttagatgaatacagcctaaaatctagaatataggaaggaagagacaaaagagtcaaagggtggcggccggctaagcaaacattataattgacggggtgttttacatataattggtgggatttataattaacaaaatttccttaagactaaatatacttcattagtattgaactctagatgctgatgcaggagcaaagacaaatgagaaaaaacattagttccccccttctctgtcattcatttctaaattctactaatattttatcacataatttatatcatcaaatttccaattccataaagtaacttttattcatttttaaaccctaacttttgacatcttcatcacaactatctcctccagctattatatactctctcctttaattttttcttcattcacatatacttttctccattatacacatttccgtgtatgtatatataataacctcacatacacgcaccatcatacaaacatcctcctcctcctcttcatcatcaacatagttgagaaagataaaaaataaagagggagagaaagagaaagaaacacatcaagaacaagaatcacgaatcaagaag

SEQ ID NO: 270 - DNA, 2000 bp, Brassica napus
  source 1..2000: mol_type = genomic DNA
tggttggaaaagccattagcatttttaactaatcatcgttgatctgattcatgcaaagtaattttgatatatatatataaaccattttagcggtatctaatcatggttataagaaatttaaattaatttgtaaagggaatctagataaatgacatctgttaaattactattagcaaataacgaaatggtacctaaaactaaaaggcttatatataagaaatttaatgcatgatttagttgatagtactttcaaaattgttttcattgagtatttttgtagatggttttaacgaaagtttacatacatgagggtataaaattttaaaacaataaatgtcaaagttgcacggcggtaatggaaatccatttagttttttaatgtctaaagagaatttctttaacaaattaaaaaggaatgttaaggaaaaaaatcaaacgtggttacctaaacaagacaaccctcaaaatgatcagatttgttgattaaatcgctaaaactgaactttcttctgatatgattattgtttacacgattacacttctgaacattttcatatttatatatttacgtattcctattagattctatttgaagtagaaaatacacacattgcatgtatattatagcatccatataaacagtatatattagtatagtatactcgtatgtgttattgtgcatatgtgtaaaagaaactataagtcaaagaacaagagtttctagaatcaaactgagaaagaaattaacggcctagacatggaaataaatgcttactttgagatgaagtcaaacttattttgcaaggagtcatataaccgtatatatttggtctttctcgatatcgacgtttctccttacggcacacgcattttcatactcatcatgttacatcatcggttaatatcttagaagcttcgtcaaactgcagtttctataattgagcactgagtgtttttaacagagtcagtaaccaagaaatgttttatctaaaccgaaaactacgtggtgggtgagagttgcatggttgaaagaaaaaaatacaatggaaacacattgtattattctgcctttctatggattgataattatgattttactgtcttacttctgctagttcacgtaggatgtatttaactataacagaatcccaaatatataatgtcgcgggggtttggtaagtagtcttactggtaagaatttattatttttctcaaattctttagtcaagaaaaatggtactcaaatgttcatacttctcttctaagaaactaaaaatttaacatgcttgagtttcttatttaggccacacattaatagattatgcaagttctgaaaactctcttggctttttactcaaaaaattctgtcataagaaagtcaagagcttgtataccttttctaacagaattcacttattcaaaccattatctataaagttaagcaaattatccaaattcaagaggtacgtcagaagttaaaaataactaattagcgatgacatttgattggctatagaggggaacatttcaacccaagtcacgacaaatcaaggcgatggttttttcctgccctctaatttgatcagttaattaaaatatataaagtgctatacaattggacacaatttcacgcaagtctttctttgcgctaatgattattaaaactgagacaacttttcacattttttaaatagataaagaaagaaaggttagaaaactaatccaaaaagcagaaaaagcaaaaccctactcagaaaataatacaattagggttgaagtaattgaattatgaaaaaataaatagaaggcggggaagacttttttataaacttttattattacattttcagttataataatcatcaattaacaccttccttttctcgtctttataaaccatcccttctcagcattatatcatttcatcatcatcaaacataataacacgtcgaaaaagaagagcaacaagaacaagaaaagacaaaaagattcgtaagaaa

SEQ ID NO: 271 - DNA, 2000 bp, Brassica napus
  source 1..2000: mol_type = genomic DNA
gaataaggcaatatttttttcatgtttgtctgatcacacgtggtataggttttgtaggggtttcataaagcaataggataaaggttgtgttctagtaagaatagggatataaaaatcagtaataaatacatcatcaaaagttgaaattccatcgttgtaaattatgcagttatatgtgtatatgagatgtaatttctttaatataaatttgggtaattataaaggaaaattatgaatgatagatttttttttttttttttttttgtcagcaacaaaccagactcatatagactctgtaaaccaaactggtagttctgcatccatatggactacaagcgagggttgccttcttgcactacgtgctagactatccgtccttgaattatgcgtccttggtatatgaatgagctctgaggtgtggaaacttcctttcaagatctttatatcttccagataacttgcaaatgcgggccattcctcgggttcagaaaccatcttcaccaactgagaacaatccgtcgcaaaagtgacagtaaactgtcttaagttcctcatacattccattgcccaaatgagcgcatctatctccgaatgaagtggtgattgactcactctagtgttccttgctcccattaaactatcaaaaccttccagagtgctgcaccatccttgtcctgaaaatctatcattttgtttccaagatccatccgtaaagcaccaccgaccagggataattggaaccgtctcgttcactaccgatcgggcctgatcagttctctgtgcatgattaatttgcgcctcggcccatagagcggactctgtttcagccaacttaagagtatctcgagggtcaatatccaaattgctaaaaaccttattatttctccctttccatatataccatagaatccatgcgaaatggtgatcctccattgccggaaccaccctccaaaataagtggtccatgtttgcaaaaagtgattgaaggggaaaaatatccgggttagacggaatccgtgagagagcccagacctggattgttggggtacattcaaagaagacatgatttatggattcctcaggtgctccacaccgtacacatatagtatccccttggattcctcttgaacgtagattattctttaccgctatgcagcctgttactagttgccaaagaaagtgttttaacttaggtgggcatcgcactttccagcagtgtgctttcaataaagaaactgatggaccaaactctggaagtgtcctaactttatctgggtacacccgctccacctcataacctgatttaaccgtatatcttttattatgtgtgaaatgccatccgtcccgatctgctatccgaaaccggcttagaggtatactctcaattaactggacatcgttcgggtccaccaaagccctaagaacctgtgagacgtaaaactgtaaaccatgttggtttgatttaatttactgcagaccaaaaaccatagaatttggtcgataaggggacgtcgaaggaaactttaacccattagtctaatattttccttcccaaaaccatttgtccaattttttgaaaaataaataaaaataaaagagcatagaatcattagattaattaaagttattaatttcgtcttcaagaattgttaacaaaaaatctccactttgacaacttaaaccagctgtaattgttttgctttggtgaccaaaaacacacacactcatttttatttttatatacaccgcgcgctctctctccaatataatccacatgtggagaagagtaaaaggcttatggaaagaaaaataaaaataagtttttcattgacttgggggcgtttcctatacagatagcaataaatatgtctttttgtctttgataattacagaaccagagaactctttttctttctcttcttctctctttcaaaaaacaaaaccaaacttcctcaagcaaaacacatagattagctaaggactgagaaaatcggagagag

SEQ ID NO: 272 - DNA, 2000 bp, Brassica napus
  source 1..2000: mol_type = genomic DNA
gatgaatcattatgaataattgatatatgtatatttaattacctgatcggcatgagaagcaagaatgaaaggatcataatattgcaactttcgcctcgaatgtactgatgtaacaccaaatgcatctgttctcacacctcaatctggagtgttgtcgtaccaatcacaatagaaaacagtacagcgcaatccaaccatgcccggatacttgatttccataatctcccgtatgtttccgtagtatacatcatctccagatgcagaacaaacgccaacatcataagtcgtactcgaacgtctcctcttttgagttgtgaatgcatatcctcgagtacaaaatctcagatatgacttcacaacatactctggtccacgcaccatctcgcgtatctaatcgtcaaatgtttcacctctgttcataccagcagacacctattaatagaaatagaaacataatggcggaactaaaaaaattaacagacactggaagtaataaacagtgataagacaacgattaattttaacataaagctgtagtagccaagatacatttccaagttctgtataatatatctatttttagacaatagaataaaaaaatgattataaactgataatttaatgcaactcatgaaatcatactacaaaatacattccatatatatccatcttattatttcaacttagcaaattcattaattttttttttttaaaatagatcatccatattaatggaatgtaatacaatattatgaagttatatgatcgcagcctcgaatcgagaattaagggagggaggatttgggggaagagggagtatgagacaaagagtcaaagggtgggggcggctaagaaaacattatcatttatggtgtttacatgttacacatatataggcatgggcgttcgggtacctattggcgttcggatcgggttttttggatttcggttctttttataacacctcctaggtctcattctagtaaatttgcaagtacgggtcgggttcggatataacacatcgggttcgagttggttttgtatcacatcatagaaccaataaagtaatcatatatcattcggattcgggttatattggatcggttcggatataccgaaataaaatctaaaatttaaaagtaaaacataagaaatagatatttatttatatataattaagtatttaaggtagttatttaaattttaaatacttattgttaaataacatatcaaaataaatatgaaattaaatatttgaagtatatattcatgtttcatataattatattgtatattattttggacattcggatctgtttcttcggatatcttttcggatttttcggttttttcgatttttcgggttacccgtttgggttcggttaataacacttcgggttcggatatgttttataccaccttacaagacccattcgaatattttttacatttcggaccggatacggatcggatttttcggttcgggttcggttcgaatttcgggttacatatattatgccccggcctacacatatatatggggataattaggaaaattatcttaaaacaaaatatatttcgtaattaaattaataataatattgaatcgatctagatgctgatgtagaagcaaagacaaaggagaaaaacactagtctcctccttctttgttatttctaaatcctactaatattatatcacataatttatttcatcaaaattttcaattccataaagtaacttttgattcatttttgtttgttttaattcctacttttgacatcttcatcacatgaaggactatctcctccagctattatatactctctctcttctttttattttcttcattcacatatacttttctccattacacacatttccatgtatctatatataagaatctcacacacacgcaatcacacaccaccctcctccttctcctcatcagcataactgagaaagagagaaagatacaacaagaataacgaatcaagaag

SEQ ID NO: 273 - DNA, 2000 bp, Brassica napus
  source 1..2000: mol_type = genomic DNA
agattacatgttaacaattcataattgtaagggttaacatcttaaagagattttccatcacccgtctacattcactagataggcacctatttgagtggaaaatcgtggcagaggcatattattgtatgttactaaaagaccgcctttatcaattattggcctgtttaatataaaactattgatttcgacctctcggtataaccatgaagtcactgaaaaatcttctcgtgtagggactccatctcaataattagaaatatacaaatcatgaaatgtaacaatatataagaacttgttgcaatgcaccttttgtaaaaaactattttagattagcaaattataactggagtctggagtagtcttctgttgtaatatattcatataaagttataaccgtgttatagaacttaaaaactacaatcaacaagttgataattaatatcgcagatggatgcatactaaagataagtgtatatcagtatatatatcagtagtaatgaatcatacatccattttgtgacagtattaccagtgaatgctcgccaagtatacatcacgcaactgctatttggtgtatgaagtgaggagtaggcatgtagctctctctaaaataagaaatgagtgtaaccaagttttattttcattttcggaaaccctcttaaatatagttttgaaaaatgccacaccaactcaccaacttaaaccgctgccccatcaaatccatttacttgttgctgctgcatatgtactgtatgtgtatatatacaaacacatacacgtctttgtataaatgcttgtatacatatattctcccccatgagaatgtatgtatgtgtggaccgtctttgtataaatgcttgtatacatatattctcccccatgagaatgtatgtatgtgtggacctcgggatcaatcactttgacaaagtcttgtgtgaaatgacttagtatgtacacgtcaccttcatgctttctctaatcttttggtttaatgtcaacttctcgtgttattttacctttttttttcttatcactagtcactacctttgggcagcggcagtccatgaactattatttccttctctttttttattggtgaatagtttaccaagaaaattaataccatgcataaatgtttgactataaaatctacatgcaccattcttttcatttatgatagtatttattaccatattcttagaccatatatatttgattagtgttaagaatatgctatagtatttcttttgaaagaagggttttgaatatcagataaagtttatcctaatgaaaattattaccaacctaaatctgctaaactaaagctgaaaatcatgttggttgtggttcgtttgattcggtttaatacaaagcagaccatgaaccggtaaaactcgatctatgaagggttgtctggtctcttcaaaagacaaacacgtaggttaaattgaaatgtagatgccaaggaaacttttttttattttttgaactttaatgccaaggaaactttaaaccatttgtctatttgttttatttccagaaactatttctacattttttctaaaacaaaatagaaaagtattaagtcacttgattaattaaaattattaacattaattgcattttgtagaattttctccactttcacaacttagaccagctgttcttgttttgttttggtgaccaaaaacacacatctatatttttgatactccattgtttctctctttctcgttacataaatttattttataataatgaagttaatccaaatggagagaagagggaaaggcataattgaaagaaaatagaaaataagtttttcattgacttgggcgtttccaatacatatagcaataaatatatgtcttccacctctgataatttttagaaccagaaaacacctcttctttctcttcttctctcttcaaaaacaaaaccaatattcctcaaacaaaacacacagagtagctataaggaccgagagagatcgtagagag

SEQ ID NO: 274 - DNA, 2000 bp, Brassica napus
  source 1..2000: mol_type = genomic DNA
atcacacatccattttgtggctagcagtaatgaaggctagctaagtagacagcaagcaactgctattaggtatatgaagtgtgttactattaagttagtggttgtgatcagtcttaagcgagtttactgacttgagaagtaaagtgagtgtgtagctatgtaaaataagaaatgagtgtagactgatccacttgtaattaactaatctaaaacccttaaatattgttttgaaaattaaagtggcacaccaacttaacaacttaaaccgctggcccatcaaaattaagaaataaaaaatgtcgccattgaatctgtgtaatatacatacattatgcctagtaaacagaaacacacaagtctttatgtgaaatgaataaatgcttaatgtattgtacatatgttcttcccataagaataatactagattttgacccgcgctttgaaagcgcgggtttatttttgttttttttcaattgacaaatatttagtaaatgtcacattttcatatatttgtgttttattttataaaagacttaaaatttttatctttatttatcgtatttcattttaaatgactatttatgttaaaaaaattaaactttatttttttaatgaattaagttggtataactctgataaattaattttattatggggttaatattttaataaaaaaattatatacttttaataaagatttatacttttcaataaaaaaattcaattatttttatgaatgcttaaattatattaagaaaagaaaaaaataataattaagaatagttgaaaaaaaattatttgaacttggactcaatggtccaaaggaaaaaaaaatgtgagaattgaatctgattttttaataggcccaaatggcccaagagagatttgatttgggctggatccaaaaataatgatccaatatagatttgttattaatattacttaattgcccttaatgaaacatgcaatgttagtgaaggaaacatgcccctaaggtaattatgacaataggatcctggtttaatagtatagatgtcattgtggtgcctcgcgatcaatcactttgacaaagtcttatgggaaatgacttagtcaaacatttcacttgtcttttggaaattaagtacacggtcacagtcatgctttctctactttttggcttaatgtcaacttctcttttattttattttgtttttttcttatcactagtctttgaacaattatttccttcttattggtgtacagtgtgccaagaaaattaataccatgcatgaaaatggttgactataaaatctgcatacacgcaccattttcatatataatagtatatcttaccagactttcatataccatatatatttgattactgtttgaatatatgtaatttaattattactaatcttaaatttgcaaaagtaaagctgaaaatcatgttgtttctggttggtttgattcggtttaattcaatgctgaccaattttaaaaggttgattggtatcttcaaaagacaaacacgtacgttcaatcgaaatggggacgtcagaggaaactttaaaccattgtccaatttgttttcttctacgaaccatttgtccaacttcttaaaataaatacataattattaatttcgttttcaagaattgtttttttatttctccactttcacaacttagaccagctgttattgttttgctttggtgatcaaaatgcatgcatataagtacattgtttatttctctgcctatgtatatattatagtaatgaaggtaatccacatgggaagaggaggaaaaggcataaggggagaaaatagaaattaggtttttcattgacttgggcgtttccaatacttttagcaataaatatatgtctcactctttgataattatagaaccagaaaacacttttctttctcttcttcccttttcaaaatacaaaacaaagatccctcaagaataacacatagattagctaaggaccagttgggagatcagggagaa

SEQ ID NO: 275 - DNA, 2000 bp, Brassica napus
  source 1..2000: mol_type = genomic DNA
aaaacaacgcatctttaccacatttttctaatttttttctatgtatgcgataaatggatatctaaggtagagtccgtgagtttcattggcttcgttttttctccaattctgactattatgaagtctttttaaaaaaatatattatatactaggtttgattagtttaccggatccgagataacatttcttcagttaggcaattttcttacctaccataacgaatttttactcttataattagtagtaatctatgtttggtacgtatcctttcattttcagatgcaaaattcataaatttcatagttgaaaaaaatccaatacataatacttcatcctaacatttatcaggtcgtttagtggtttttactcttaaacagtgtcataaaaaagagagagattgtgccatgcaccctatttcgaactttgcttaggagatgcatgtttatcagaggttagtgagacaatccccaacgggagagaggggggggatgatcacgaggagttcctactcatttcattattatactataaaaaaagaaaaagctgacaagacactaaacaaaagtatctcttcctataagtggcggtagcttagtggcaatctctcggggcttggtgtgtacccacatcagtcatgggttcgattcccctgggaactaaattatcactacttggccagtttgggcttgagtttcggtccaagtggtttacatagtgggccataatagatgattggtccaccccctggcattagtcggaaggtattccaaactcgggtcagacagtgtagtacgctttcgggttagtctactctgtagcacaaagtgcgttccttccgagaccgaccggatcagccgatagggtttatcaaaaaaaaaaaaaagtatctcttcttataagtttttaggaccgattagaacctcattttcttaacttgtcttcttttcattggttagagattctttttctttaaaattaaattttaatcagttgataaagtgaaccaatagtagatttatggcttagatactcaatttgagtcttttgctgttcgccatgcattcataagagcatgattattgggaggttcttagggtagggtccccaccttaagaaccctccaataatcatgctctaagaattcaggaattttcaataaaaaaatttactgtaaagtactacataacttatcttaatccatttcacgattacgaaaatctatagacagtcaatattattagaaagaaacttagaaattttcaaaaaaaaactttagtttgtgactggtaaattccaggataacacggagtaaatgaaaaggtgaaaagtagaataaattgaaagcctccggaagaaaaaaagaaagaaaagtagaataaattatttctcttttaaatccaaggatacaattccagattgttttttcattttatctacaatatttagagtaaatattgcattgtgataatttacatgactgataaatttttagctgtatatggacgggagtgtataattcagagtaaaaatttactctatagataccagccagttacagccttggagaaaatgttcaaaaacaaaaacatagagaaacttcatgtaagagtacagtagtcttcgttatcttctgtccttttttattttatttattttactgttgtatagtatttaatatattggttttatatttttttaatttccacaaagtaactttttcattttttaattttagaaaaagtttcctactttttgaaatcttttcttaggaagactttttgatctaccatcgcatgacagtactatctcctccagctattatatagtctcctttcgttcttctttgctttcacataacatttcccctataatcacacacacatccacaccatcattcccaccaacataaaaaatcttgattacagagagataatagagccataattcaagaacaagactaatatcaagaatagaaaagcatacttctcaccaggagagga

SEQ ID NO: 276 - DNA, 2000 bp, Brassica napus
  source 1..2000: mol_type = genomic DNA
cacaaaacatcaattgttctcatactaatatatttatcagtgagttattgctcaatatgagattgtgtatataaaatgaattataaattttctagttgtataacacattcctatcaccaaacattcgaagtatctgtctacattctacaacatataatacactcctttgtactatatgtacatgtgtacgtaatacatacatgtctaatccaatcacttattggctcaaaattttgaagaatattgaattgctttattattgttgatgaccaagtctatcacatgcaacgaaagtacaaataatcggtctttctttctttttcgtaagatgccacgcaagtggggtttcaagctttagtaaaatcttacgtaataactacatatatacacttccgactgttatgcatattattattttttagttacttcgtatttcgttccacagtatatagatgaatttgaagtatttccaatctttgaatgccatttactatttatgttatactgtgttagtttttttggtggtaaacaaactgtgttagttaatcacacgatcctaaacggcgtatcagatatgatcaaaaactaaatgatataaaaagcaatcctctactcgcgatataagaattgaatcatgatgaaacctatagggtgtaatatcatacaataaatcatacatacgtatacatttactagagatataaaatgacggaaattaaaaagataattgactgcaaatagaaaatgataacatagcgactacttttcaacattaaactctagcctatggttgttcaaaaaaaaaaagactctagcctatatagtatacatttccgagtctaatatatataacatatatatgtttgttttcaaaagtcaaaagtaaatataaacttagaattagatgcagctcatgcaatcatattacaaaatattagagcatgattattgggggttcttagagtggatttcttaacggaatataagaacccgtctcttagctttcaactaaaaaggctaagaaccggttcttaaataagagttttaagaactggtttttagctttttttagttaaaagttaagagacgggttcttatattccgctaagaacttcatcgtaagaacctttcaataatcatgttcttatatacatgtccatcttgttttcaacttagaatttgttcacgtttattgaattgatttttgttttaaatgatcatccataatggaattgagaagcatgtttgacgtgaaatgggcgcatcctaataaaaatcaagaatagaaaggacgataaaaagagtgaaagggtgacgggcgccccgggcggctagagcatgattaatggggttcttagggtggattcttagcgaaatataagaaaccgtctcttaacttttaactaaaaaaactaagaaccggttcttaaaaattttttagttaaaagttaagagacagtttattatatttcgttaagaaccccattagttatgttcttagaaaaccatatcagtttatgggggttatgattaaaaacattatagcaaaaataaacattttctttttaaattagtattgatattgaatctctagattctgatatatgagcacagacaaaggagaaaaacattagtctcccccttctgtgccacctataaattctaacaatatcatctcacaatatatatatcatgaaaatttcaatccataaagtcactttttgattcattgttattttaatcccttacttttttgacatcttcaatcacatgaaggacaatctcggcctccaggctccagctattatatactctctctccttttcattttctacattcacatatacttttctccattacacacacttcaatttatgtatatataacctcacacacgcacaatcacacaccatcatcctcgtcctcttcaacatcaacataattgagaaagagagaaagagatacaataagaataagatcaagagtcaagaatcaatacg

SEQ ID NO: 277 - DNA, 2000 bp, Brassica napus
  source 1..2000: mol_type = genomic DNA
tagggctgggtaaaaagccatttccgaagaaccgaacccgatccgaaaaagtagtattgaatctgaaccgaaattgattaaatatccaaatagtccaaaattttggtatttaaaaaaccgaaccgaaaccgatccgaaccgaaatattttgggtacccgaatatattcgaaatagatttataaacctaaatattaattatttttagatttaattcatattaaaaacatccaaatatatatgatacttttaagttatccaaaatacttgaaaatatatacaaatagtcgaaagtaaatgtccaaaatagttaaagtatactcaaaacaccaaaaatatttaaaatatttatttattctttatccaaatattcaaaccaaaccaatttatatgttaaatttaggtattttgacctatgttattcaaatttatatgtagtatattattttgtttatagattttgagtaatttaaaatatataatgaattttaaaattttaaaataatttaaatagattatccgaacccgaaccgaacccgcaaaaatccgaaccgaatccgaacaaaaatttagaaatacccgaatggagctgatatctttgattccaaaaatccgaaacccgaattagacccgaacgggtacccgaacgctcattttacggtttcctcctgttattttgctgcctagttgtgattccatacttccatgtcacatatgattatttaactaatagtcacagtcttttgatgaaatgaattaacatatatataatatatgtttgagataactgtcatttacctagttaatttttattaacaagaatggtttttcagatcaaattagatcttgggtcaaacatacgcgaggccagaaaataacactatatatgcgtgtataaatgagaccataagtcaaagaacaagagtttctagaataaactgcctagacatggaaattaatgcttactttgagatgaagtcaaacttgaaaggatgcataaccgtatatataaggaatatggtattctcgatgccaacgtttttccttacgccacacgcattttcatactcatcggttagtttttttttttttttgtaactctggtatctaggcagccacattcccaactatctccccgtagggggtccagcgccccagcggaagggatgttaaatccgctgtagccggggctcgaactcgtgatggcggacacctcagccgaagttcctataccaccagaccacgaggcccggttaaaaacaaagattgtgaagcttctcataggttagttttagaagcatcttcttcaaactggaacagctataatttgaccactgaggttttcgaacaaagccattagaaaaaaatgttgtactcaccaggcttctcaaattttctgtcttgaatcaagaacttgtatattttctgatagaaaagcacttattgaaaaaataagtttcaaaaaaacacacgcacttactgaaaccattatatctatacattcacgcgccaactttcaaattgaacaagtacattaggacttaaaaataacgtatgagtgatgacatttgattggccatatagaggggaacatttcaacccaagtcacgacaaatcaagacgatggtttgtttcctgccctttagtttgatctatcaagtaaaatatataaagtgctatgcagttagacaaaatttcacgcaagtctttctttgcgttataaagaaaggttagaaaactaatccaaaagcaaaaaccctagtcagaaaaaaaatacaatttagggttgaagttgaatcatgaaaaaaaaattaaaacgcggagaatactttatgtttttttttagtatttaccttttcggttataataatcactaattaatacttcattttatcgtctttataaaccatctactctatgcatcatatcatttctcatcatcaaacataatcactttgaaagaagaagaacaataaaagacaaaaaaaaaacttgtaagaaa

SEQ ID NO: 278 - DNA, 2000 bp, Brassica napus
  source 1..2000: mol_type = genomic DNA
atacatccttcttgggaaagcgatggccttttggtagagtggaggattaggattacgggaaggaggtagtaggaatggggccggaatggggtaaggttgggccggaacttcaaattggtttgagatccagcccgtactgacaaggcaaaatgattggtggggaatatttatgcccatgtaacaccctttagaagctcttaaaattgtctcatttatatagaagtgatagttaaattagagtaatcacataaatcataataatcactcttgtttatttacaataatttttattggtaaataagtaaaaacaaccattttatttattttatattattaaatttaaatgatattgacataattatatagtatatttaatatggatatttattaattaattttatgcacatataattttattaacatctgtatatatagtttataaaaagatgttaacagatgagatgaggagaaacgaagtctacaaaacaacaccactcacaccactacaaacttataataataaaacaattcctaggtcattaatcttttgaaatctcacttgtttgttctaaagtttagcagaataatttcctatttaagaaagaagttcagatgcttacagattttctctaactaatgacttttgtttaacgctaggaatatatgcatatcgattcaatcattaagtttcgatttactttgaaaaccaaaaagacaaagatcacgatcaatctttacttctgtaaataaaagtaaattgttggcccaaaagacctaatccaagaattgtctcgtggattagtaaaaaaagcttgaaatacttaagtcaataactcaaaagtcgtacctgcttaatttgtcttactcatttagatgtgtcggcactatatcatgatcaactagaggatatttacgttttttaatcgtgaaatagaaaggatcagttcaaattttctctgcaatgaaaatcagtattcgtttacatcttaatatcatccattgaacgaatctaattttagacgtatcatgtatgagcttgcttacgagtttatatttaactgattatataatttacactgacatcacttgactccgtcaagatatttgtactcgtcgagaagactgattcttcaatagcgtgttgaaaacggtcttttagttaaattttgtttgtggttttctctcactttttcttgcaaccacttgttttttttttgtaaactggaatatacaaagaatgaaacgttctttgaatttttattgtcattactctttgcgtctcaggtcaagtcagccatttgctttttcatctagaagattatgatggttcaaacataattcataattacatagtgaaacagttttgacttaaaaacacaatccaaaatatcgataagcagctaagaaagaaataagcaaattcattcacctagttctctggaaggtgaattcctatatggattatgtatgctttttggtcaacgaattttgtttattgaatcaaaccaaatagattagcggaggatatatatgatggactataacataaccattattaaaaagtacctgctaccacacattgatgctgaaataacatacatgcgggaataacaatgccatttgttgtctcttttcttttcttcattatatctttctttatgtaatatattttcttcactttcttcctaaaaatacttataacatattagtataccattactttgataaagttttccttgtttgaaataatcttaaagtacccataaaaccctattcatttttacatttatttgagttttaggagaccgattcttctgatacctttttcctcatctgcacactataagtatacgtacaaacagaaatccacttgtcatcattctttgttaagtttcctgatatatatatacatattgatagcactacgaaagataggtggtaccttgacaacaacaaaccccattgagtaagaacagaaaatatatttatttttttaaaag

SEQ ID NO: 279 - DNA, 2000 bp, Brassica napus
  source 1..2000: mol_type = genomic DNA
tttctttatattttacactaaaataaagtaactttattatagagttagataatatagagtaaaaaacaacattcctctatatttcactctattatagtgtaattctattatatagtgaaccattagagcaaattcaattctatttaatataaaataaaaagaaaaaaatagtgttctattggagatgcccttacaaaaagatattaagagatgagatgagggagaaacgaaatctacgaaacaacaccacacacactaacacaaactataataataaaacaattctcaagtcattaatcttgtgaaatctcacttgtttgttctaaagtttagcagaactattcctcttttcttttgataattaaaccctatggctgatcccgtaacgcacttagtgctacatagtggactagctaccacactgtctgatccaagtttggaatacattccggttaatgccaagaggtgaatagatcatctattacgatccaccgtgtaaaccacttggaccgaagctcaaacccaaactggctaaatgatgataatttagtttccaaagaaaatcgaacccatgtgaatgcacaccaaatcccaagagattgccattaggctaccaccactttggctacaatttcctatttaagagagaagttcagatacttcagattttctctaaccagtgacttttgtttaacgcgaggaatatattcatatcgattcaatcattaagtttcgatttactttgagaaccaaaatgacaaagatcacgatcaatctttagttctgtaaataaaagtgaattgttggcccaaaagacctaatccaagaattgtctcgtggattagtaaaaataagtttgaaatacttgagtcaataactcaaaagtcgtacctgcttaatttgtcttactcatttacatatgtcggcactatatcatgatcaaccatacgatatttacgtttttttaatcgtgaaatagaaaggatcagttcaaattttcactgttatgaaaatcagtaatcgtttacatcttaatttccattgcacgaatctggttttagacgtatcatgtatgagagtgtctaagagtttaaatttaactgattatataatttacactgacatcacttgactccgtcaagatatttgtacttgtcgagaagaccgattcttcaatagcgtgttgaaaaagatattttagttaaaattttgtttgtggttttctccactttttcttgcaaccacttgttttttttgtaaactggaatatacaaagaatgaaatgttctttgtatttttattgtcattaatctttccgtctcaggtcaagtcagccatttgctttttcatctagaagattatgatggttcaaaacacaatccaaaatatagataagccgctaataaataaattaataagcaaattcattcacctagttctcgggaaggtgaattcctatttggattatgtattctttttggtgaatgaattttgtttattgaatcaaacgaaagagattagcggaggatatatatgatggactataacacaaccattaataaaaaagtatctgctaccacacatagatgctgagataacatacatgcgggaataacaaggccatttgttgtcactttttaatccttcattatctctttgtttacgtaatatattttcttcactttcttcctagaaatacttattaacatttattataccattactttgataaagttttccttgtttgaaataatcttaaagtacccataatcttaaatttttttacatttgtttgaatattaggagaccgattcttctgatacttttttcctcacctgcacactatatgtatacgtacaaacagaaatccacttgtcatcattctttgttaagtttcctgatatatatacatattgataggcactacgaaatataggtacctagacagcaacaaaccccattgagaagaagagaaaaaaaaatatattttttttttaaag

SEQ ID NO: 280 - DNA, 2000 bp, Glycine max
  source 1..2000: mol_type = genomic DNA
atgtgtccatgaaactattagaaggtggtgataagaccagtcaacaacacacccatactcggtacacatatagaggcatgaccaatgctaaaaagacatgtgtaggggattttggagggtgttgtccaatataaatggaggtgagctggataacttaagtttatgattaggtagagctggggagggtgttgatcttctttctctccaacccaaacaattactttgtaaaacaattcgtattattattaaataagagacttttttttaataacattatatttgagtgtataagtttggatgccaacttgactaactaactccgtcatgtctcctttatatgctagactttctggtgtactccttctatcccattttataaaatctagtcaactaatttatatcctttaagaaaattagttaatttaattaatatatattaaatttgttgataatttgtaatgtttgttcaaaattacccttagtttttttaataaattagtcacctctctctttctactcatttgcttcttaactaattgctactcttcttctccgatcttaataagagagagaaaatttatttcattaattttcagcatttatgattttttggctaaaaaatttgtcaattaattaagggtgctattgagaaaaaataactaatgcaacaaacaattaaaaaatggtcttataaaaaaatatttttttaaaaaaagaatcttataaaaaagagggaaggattaaatgatactcccttcatttcaaaataataattttttgcctttatttttttgttccaaaattacagtcttttttagcctttttaagctatattttttaacaatacccctagatataattaaaatgataaattaatacttgcattgaagatacatcaagcataaaaacaagttggtagataatggaatgtatttgttattggtggataataagataatttatgaacagtagctatgaaataagagtattttttgtctaatttgtatttactaaatatttcttaatcaatctgttttttttactgctcaatcaatctgctataaccttaaaaaattattattttggaatgaagagagtaatgtaaatttggtttcttacctgttatagctaaacttgtgtgcatgcattaaattgcacgtttgcacctacaaactacatggaaatatccagattaattaatctgtccctatcaagctgctacattttgttaatcaaacgaaataatcgtcaaaacttctacagtatctcacttcttcctatataatttctccaacctcacatgtgctatcagatcctcattcatttttctcgcctcgatcaacttcccgtgctaaacattgttcaggtaattaaaaagttgagtgtatcatgtcatgcgccatgttcaatttttgcatattattctttgtcacctacagcaacaatattccatggactatttctttttaacatattcagtgatgatatacagaaatctctatatattatataacatctattatttttttctatttcttttttcttatcacattatatcactatatattatgcatgcctacttttttctctcgcctttcagttaagtgttaattgtaggagaaattactagataatctcgaattgaatacatattacataatttattttttatatacaaatattaatttgttaattttcttaaaaatatctattaggaaattcgaaccccagctccttttcccctcattatttctcaatcattacaccaatcttatatcttcgaatacatgtcacacagtaatttgtcggaagttggaacaaacagaggataatatgagactacttaataatttctggtcgactagggtttggtattcattttttttttcttacatttttcatcagcttgaaagttgaaacgttgccaatttttttcatcatctcactctttatatatatatatatatatatatcatgatttttcaaaatgttcttacgtg

SEQ ID NO: 281 - DNA, 2000 bp, Glycine max
  source 1..2000: mol_type = genomic DNA
taaaaatgaaaaagaaaaaaattaataacttgtatataagttaactatttttataaactatttaaaatcacttaagggtgagtttgtttaaactaaaaaaaagtaacttcaaataaatgttttttatataagtgtttttttatgaaacagatcagatttatttttaaaataaataaaaaattaatttttttaaacagaaataatttaaacaaacacactaaaaaatatataattgtttattttattaaaataagtacttatttcaataaataaatttaaaaaattaatccttaataacttataaaataagaaataaaaaagttaccaaaataaactgccaaacaaagtcacgcacgatcaagagttaaatgaatttttataaattctccgaaacactccctatgtcttcaaagttcaaatatgtgatcaagagttaaatgattatgttggtacgtaaatgtttaaaaatattaatttcttaaatgaatttttatatctagagagactattcgagattatcagccgccagagaaaaaaaatcacatccaacttgaaattttcttttagatgtacgtgtattagaattaactcttatttcttgtaaagctaaaataactatagcctcgtgaccttaattcaagcaaataagacttattccggatgcatattatttcaattaattaatatttcgcatacaaataagatttcagccagtctgcaaacctgaaacatataactcctctaggaaataagagttaatcccgatacgtgaagttttttttagggatgatacgtaaagttattttgacttctgaaaagctacactttaaataataaaatatacttatgttccttaattaaaaacataaacgactaattaataattgtaataaaattatacataaaataaaatctaaattgttgattaatggttactgaaaacacattagtaatctatgtcatatcatgtacacttttagctaattaaattaaataaagatcgagaccaatcttaaagcggaaacatatgtcccagcatgtcctttttctaattaatattgccactggtgcatgaatcatgcttggcctatcaattcctattgacctaacgtattgatcatgtctccagaagactcagagctagagcgagtttatttaccttgagaaactaaaaaattcattcgaaatagtaatatagactatatgaatcaatgaaggggtgatatttgaacattaacaatttacaaatatttcattaataccttttttttttttgtcacgtcatattactaatattattaatcacttatctcttttatctctctcaaagtatacacacttttattcaagagtaatttcccaaatcaactaatcgcatgattataaagattgcaaattaaaattgtgttatatagtaacaaattaactcgaaggacacctacatatatattttatacttctctaacatttttgacaatgaaactaaaaacacccaaaagaaataacaagtaccatcgattcggaagaatgaacccgaacatcacaatgaccatggctggatactcagcgcaggcgttagcattaaatgttttggcacatgaagcccgacaatgacagtaaactttatttttgtaattatttattgttatttataacaataaaattattttccaagtctaacaacacttaataagtactactacagtttattctctgtttaccaataaagcaagtggctaacctcttcctatataaatttcttttaggatatgcacaaatctgagttatataatcgtctatgatcatatatatctgtgtatcaattttctctcaacatcctaggtttgctgctgtaaacatctgatcagagtaagttctgctactactattctttttgcatattcataactagcttgttattacacaaaatttgcatacacacacacgtttttaaatacacaaatgccactcgtttaaaaattgtggtcaggttcatatat

SEQ ID NO: 282 - DNA, 2000 bp, Glycine max
  source 1..2000: mol_type = genomic DNA
gcaaaacaatattttgcgaacatgacaaagcattctaacaaagaaaagtccgaggtgaaaaaagatgatagaaaacgcttaataataatgataattacattttaatatgaataaaacattatgtagagcttcgatttaaattttgttgataagaagacttgaatatatattttttatccataagaaatatttgatttttgtgtttatttttttaatacatttttatttttcgttgaattcttaataaaaaaatattttattttttatacttgatattttattgtagtccatgataaattaacaaattttatgttagttttctgataaattaataaattttgttttagtcccaattattatcaactgaatttttttattaggaaacaaataacaaaatttattaatttattagagactaaaaaaagtgttaatgacaaaaaatgttattttattagagatttaacacaaaataaaaatttattagaaagtaaatacaaaaaattaaaaattattaatgataaaaaatatatttaaacctaataagaatagtagagatcgagggactagtgataacatcaaatatttttctaaagaattcaagctttctaatatagttagtagaccattcaaccaactatactcctcaaaggatcatcctaacttgaaacactatctgatctcctttatagagttgaccatgaatgcaccttaagagtgatcgaatataatggtctaatacaccatgttgctttagaggattctagtgttcttccaatgcaataaagtatgtgtacactgaaatcattagaacgtggaaccaacaccagacaacacatggcgtctttgacatgtcagagacccacaacaacacacccatactcggaacaaagctgacaagattgtacacatacaaacacgtgaccaatgctaagaagaaatgtgtatggggattttggaaggacatccaatataaatagaggtgagtagtaaggctcaagttcatggttaggaggaagagttgaaaagggtattgagagaggttgtggagccaaaggtccctttgttctctctatggcattcttcaatgtgaaccataaaattgtaaagcaattcggattattattaaataagagacatttttttaataacaacattttatttgagtgtacaagtttggatgccaactccaccaaccaacatttgctctattttataagatctttttaattaatttgtctcctttaagaaaattaactaatttatttaataacattaaatttgttaatggtttgtaatatcctttcaaaattactcttagttttttttttttgaaaaaaaaccaactttctcttttcacctagttgcttcttctcaactaattgccactcatcttctctaatctcaaaaagagtgaaataatttatctcattaattttagaatttattattttttgcttaaaaattttgtcaattaattaagggtactaatgaaataaaaaacaattaatacatcaaaaaatttataaaaagagataaacaattttttttgaaaagagtcttataaaaaaatggagggagtaaatagtacttccttcattccaaaataatactctttttaggtttttgttttagtttcaaaataatagtcttttagcttttttaagctattttttttctaacaatacccctagatataaataaaaggataaattaatacttacatttggtagataatataatgtatttggtattggtgaataataagataatttatgaagagtagttaaaaaaaagagtatttttgtctaaatttatatcacttaatatttttcaatcaatctattataaccttaaaaaattataaatttggtttcttacctgctatagctaaacctgtgtgcatgcactgaattgcacggttccacctataaactacatgaaaatatccagattaaataatttgtccctatcaagttgctacattttattaatcaaaccaa

SEQ ID NO: 283 - DNA, 2000 bp, Glycine max
  source 1..2000: mol_type = genomic DNA
atctaattatttttgcgtgtaaatttgaacttaacctaattcaactctaaaaataatttattttctaaaaattacctaaattacatacattttttaatcatattactagttgatccgaaatctccatgaaaccatgttatgttgcgctgaaaaatatgaaataactcttgacaaacagcagatgccaacaccgagcaagaacaagaacaattatgaaagcatcagatgtcaaattattaaaattggtatattaatcaattactatttttatcattaattaattaattactataagggcgtgtaagtggtattttagtttgatgcagatctgtagaggtcaaataacctagtgctatggtgttctttttcattattgggatacatataaatgggaaaaaaaaaacgtatataacgcagatgcacgtacggtctgaaatccaatcaataaatacaagttaaaacaacgtcccagcatgtcctttttgctaattaatattgccattggtgcatgaatcattcttcaccatatcaattcgtgttgacctagcgtattgaccatgtctccaaaagactcaaagagcgcgagtttatttacctttgaaaaactaaacaaattcatttaaaataaatcaatgaagtgatgatatttggacttaaaaaaaaagttctattaatatctttcattttttttatttttgtccgatcatgttaccaatattatcaattaagtagtacttatctattctatctctctcaaaatatgcacaccgcttgttcaagagcaatttcccaaatcctgatcacgtgataaagactgtaaattgtgttattaacaaattaactcgaagaacacctacatattttatatttctctaactgttttggcaatgaaactcaaaacaaccaaaaaacaaaaacaagtaccatccattcggaagtatggacctgaatatctcaatggccattattgctggatactcagcgttaaatgtttgggcacggcacattccccagacaatgacattaaactttattttatactatagtaattatttaggctaaatgatttatttaattttaattttaattttttttctttttaaaatgatatttattttcatctaaatgttaactttaataataaaataaaaataatgacagttaaatatcactacaaaattcaagtttgtttgtaattcttcctcattcttttcttcttcctggctccctctactccctcctcttacctgcagcacctgatggcaactcttgtgttgggcgacggagctaattaatcaccctaacatgataatcgtaatccttatccaagcaggaacagagcaattctagaaaagaataaaatccctaaagaacatatgaatcccaaattaattaagaccggaatttttcgtatgtattcttacggagggagaagaaacacattttacgccagtttttatccgtcaatattctttaatggttaatggtgttactattaggtggaccattttaaatattttaaaaaattaaaataaaatttttaaaaaataaataattaaattaaacaaataaaataaaataaattaaggatcaaatagattatttgtcctattatttatagcaattaattaaattattttctcaagtcaaacaagactgaatatagtatagtttaataattattctcgttcaccaaaagcaagtggctaacctcttcctatataaatttctttttgaagaaatagagtatatgcacaattgagttatataatcgtctataatcatatctgtgtatcaattttctttcaccatcctagctagctttgctgtaaacatctgatctgagtaagttctgcaacttctttttgcatattcataatatatatactgtacgtattacagaaaatttgcattgcgatgctctttacacacacgtttttaaatacaaatgtaactctccttttaaaaaaaaattgtggtcatgcatcaggttcatatat

SEQ ID NO: 284 - DNA, 2000 bp, Glycine max
  source 1..2000: mol_type = genomic DNA
tttaaactataatttataattaaatgataatataaaatttgataagacataatcattaaattcatataaatattaataagcatcttgcttatcctttgccaaatgggaaatgttgtgaaagccataaagattttattggtttgaatgattgatttttttgggtacattgactgattattattaggccggtgttaacaaatgcattaggggataatttaaaaggaaaaataaaaaataaaaaagtaaagtattcaatgtactaagtactttttctaaagaaatgtaccaagtacttaagaattaagtaattttttttaatacaattaaaagtatttaataaaacacattggctgtagacaaaaaaaacattggcgtaaactagaaatatcataagcgttttgcatataaatattttattgacgtgaatgattgattgatattaggcacgtgtgaacaaatgggttgggcataaagtgtataaaagaaaaagattatataaaagtgaagtatgaaatattctaattttttattttacattttaaagtttttctctctcgataaaacaccaccaaaattaagtcaacaaaaaataaaaaattcattaactgcttgaaaaaatgtattaattttttattgagttgattttgataattttaaactataaaaaattaatttcggacagttaaaaatcaaaataaattgtgaagatcttattctttgtttgactcatactgtggagaaactaaatagcattatgcaaatttcagaaattaaaaataacaactttaaatttgaaggactaaaaaagaaataatccaaatttaaggaaccaaaaatatatttaagtcaacataagagtatgtgtatgtttgaagtgattttttagtgtttagaataatttatgagtataagtgtaaatgaatcaagttatttgtgaattattcgagttagacttgttaaatgctcaattaagcttgtttctttaattaaataaatgagttaagctttagcaatccatttttctttcagagaccaagtaaaaaattctattgatcggcttaactgatttatactcctattatgaggaaaatgtgtttttgatcttattctttcactaaaacttggtcttagtttctacacttttaaatttgtgatggtttaaatgataagcatgattaataagagaatttatatttgatttttattacgtgtaatttttttttgaaccaataataattacaaatcatgagtgaaattaatctataactcaataaattaacaagtaatctttaactatgaataaaaatgatctaacatgaatttgatttatacacgcacttaaaaccatggaacttaaacacggttatgccacttttaagtttactgccaaaagtaatgatgtggaaaaacaacaactaattaaacaaaatattaggttagcaaatgtgggataccaaccacaccaaacaagcccatctcgcttcatcttctgactttgtttcctttggtctttggtctctttactagtggcctaccctcacccatacacaatccagtgtaaacaaaaagggaaaaaatatataacaatcaagtcttaaagaataaagataccacgtatttttagtagcttgcaccgttgtctatgaacaactacctctcaccttcacattatatttattttcttccatttgctatgttttgaaacatctaagaactccatccatatcatacatatataccttgcaactttctcttgaagaaactcagacccttatcatattgtgtgagagataccccaggtatgagcaacacaacacaacacgtgttcctaatgatgtttccaacaacattgcatgttctagtcttgaactttgactatttatatcttacttttgagatccctctagagtgcttttgtttccattctctcaaacacatgtttgatgtttctattgttcttcttttttgtggtacaggttaattatactaaggagtttgag

SEQ ID NO: 285 - DNA, 2000 bp, Glycine max
  source 1..2000: mol_type = genomic DNA
tttgagaaatgtttaatgttaacgaaaaaaattagattttctagattagaggatgttagaaccaattgaagaagcatattaatttgaaaaaaaaaaatcaaatgaaagggaaggggagaactaaaaggcttggacattcgagaaggagaaccaaaaggtttgggggcttctttatgttgttcttgtcatatttggaacagtggaggagaaacaaacgcaaactcaattcacattgcgattttaattctgaacacttaccatagggttcagagatggggatgagtgatcgtgagagtggatgtgaatttggtgagggaggatagtggagaaggtggaattgatggggaatgggttaaagtggagttgaggatcgaatcagaagtggtgttggacacaagagggaggcaatagagaaaggccagggacgaggagatgaaataattaaggggagaactggcttttgtttctgctcgtaagtgttttgatttgcaaatgggttttgatttttgtttgagtttttttttttttttttttaaaatgtggtttggttggtgtttcagtactatttggattctaatagtatgttgttggtgcttgaataattgattttggggttggttcaaagtttgagagggtttaaacatggaattttagtttgtgacagtaaaaagttgtcacaaaatgtattctaaaccgtcacattcaaccaacctcaatccatcatttattatgtcaacatgatcattgatgaaattaggggcaaaaaatattgttttctttagttggaagaccaatttcatcaatttaaaaatgtagaaactaagatcaaatttgaataaaattaaaaaatacaggactaaaaataattttttcttataatttattatcaaaacacatatgcactaaataataaaagagtggagatcctcttcggttatcgaaaaactcatgaaaagagaaagatacaaaatatttgtaggtcggagagaactttaacccataattaaaaaatttatttatagaacactttaggaagaattttaaaattaggatgtttttggatgagcctcattaactttgaaattaagtgatttatatttaattatatttttttattttaaaagcaggttagtaaagtttttatttaatattttttttgtgaatttttatttaattcaaaagttaaacaaagttgtttaagctcaaaataattttttaacccaaaattatttcaacgtgaaattatatactgttatataaaaatttctcttaaatcacattaatttataatttaatgcatttttaaatgatctagcatgtctttgaacacgcactaaaaccatggtactgaaacacgattatgccacttttaagtgcactgccaaaaataatgatgtgggaaagcaacgactaattaaacaaaatattaggttagcaaatgttggataccaaccacaccaaacaagcccatctcctttcatcttctgactttggttccttatgtctttggtctctttactagtggcctaccctcacccatacacagtccatagtgtacaaaaaagtaaaaaaaaaaaaataacaatcaagtcttaaagataccacgtatttttagcatcttgcaccgttgtctatgaacaactacctctcaccttcacattatatttattttcttccaattgttatgttttgaaacatcctaaggactccatccatatcatacacatataccttgcaattttctcttaaagaaactcagacccttatcatattgtgtgagggacaccccaggtatgagaaacacaacgcaacataacatgtgttcctaatgatgtttccaacaacattgcatgttctagccttgaactttgaccatttatcatactcttgagacccctctagagtgcttttgtttccattcactcaaacacatttttgatgtttctattgttcttattcttttttttgtggtacaggttaattatactaagtagcttgag

SEQ ID NO: 286 - DNA, 2000 bp, Glycine max
  source 1..2000: mol_type = genomic DNA
taaaaagacaatgaagaaagaaaattactccaataaagaatatcatgtcatgttcatgtcaccgctcaccctatttctcggcgttgatgttgtgaaatacctcaattataataagaaatcctaataacattttctaataaattctttatcgcaaattaaaatcatttattaaaaaaataaaattgcacaagtcttactcccttcaagaaatgctagtaattaaaattatttattaaaaacatgtgatctttaaaaaaaaaagttactaattatcaaattatgtcccaatcaaaatcatttttttataataatcatttatcatattgattaatatacatatatatatatatatatatatataattattttaaattaactagttattatacaatccgttaattatgattataattaaataaaaagtataaccgattattttgatcacccctactttgatttatgcgctcgatggcattgggaagctttatatatataacttttatatctttcatatttcacaataatagttaaaaaaatatttataaatttacattaaaaaaagagctacaatattttaatgttgtagttattaaaaaatttcatacgtaccctaaaatataacttgttcattaaagtttacagtttttatgagaaaatgatgtcgcgacaacaaatgaaatttccgtgcagacaataactaaatattactcagtatcttttgtcttgcttctataattaagtaaccaataattaaattacgaaaaacacttgctttaactcgtttccttcatcttaaaacaaaaacaaaaaacttgtttccttggatataatttcctcaaattgatctttatatttcacgtctcatctgtgaaacaagccattttatcagtcagtatctgtcacgtagcttgctaaatgtactacaagtgtatattcatagacaaggtcgttctactttaggaaatttattatgcataaaaaatataagtaattccgtgtaatctacatggaattacgacttattaattttgttagattctttaatcctgtcgttttactttgttcaagtttaattatattcacttcaactgttgcaaatactatcatataaaatatacatgtttttatgtcagatctaaaatgatttttcacatctaataagcaatcacatcgttaattagtagtattaattatctaagggaatatcactgctgttattaagattataaaggataatattaagaggtactttatgtaaaagcttcaagtcgtgtaattatgctcaagattttacatcacatagacgcttcaatacgtcaagaatatggttactgcttagtacacataatttgcaatattttaggatgaactacatcaattttgtcttgtactctctagacatcagtcaacagtcgtatatatatagtatgacgagataattaatttttcatatcaaacaaaaatattggtcaaaactcaagatacgtatgtttcattttaagcaatggtaagtgacctaaaaatactcgtaaaagacgcgcaaattttaattaattaggtgtccgaagaccaaaagtagccggctaccaatagtacttctaaactaataagtcagaaaaaaaaactttttaattaatttgttggggttaagtcattaatctttgcctataaacgttgcttctaatgctctattcttcgcggatatatccacccaaaaacatagagagagaaaaaaaaaaaaaaaaaaaaccaagtggagagagagaaggtagttgtaaaaccgctaaactgctttgtgttagagaccagtcaaataaattaaagcccagttccatagtcttgtatataagtcataaccataaaaaccatattcatattataaggtgaaacattggaactcaaaaaatcacaagccaaaggcaagtacagaaagaaaaaaaaaaaacatcatttgtacaagaagaaagagagtaattaaatctggtgaataatcctaagtt

SEQ ID NO: 287 - DNA, 2000 bp, Glycine max
  source 1..2000: mol_type = genomic DNA
tatttaacaataatagttaaagttatatatatatatatatatatatatatatatatatatatatatatatatatattaagagtttacataaaaacaaagagagttacattcttttaatgttgtagttattacaattcttcagacataccataaaatacaactagttcattaaagtttacagtttttttgggaaaatgatgtcgcaacaacaaatgaaatatccattgcagacaataattgaatattactcatcatcttctgtcttgcttctataattaagtaaccagtaattaacttacgaaaaacacttgttttaaaatataaaaaaataaaaagaaataaaaataagtaatatttgtaaaagtaaatatattttatatcttttgaaatgtctttttgtatataatatatttagcagttgaacacttttaattttagagtttaatggtgatgttgataatgttaaataattttatattattatctaattataaaattttgttgatatgatttataaaataattattgtaaaaagttaataaattagacagtaattaattataaattttagagttgtaattaaataatgatatcaaattatttttcaacgtcaatatgatttattttatcttaattttattcatcacaaataaaaaaaattaaatcatattgtttctttacatgcagactgcaacatgtaactagtaattaacttaggaaaaacacttgctttaactcgtttccttcatcttttttttaaaaaaaaaaaaaaaaaactttccttggatataatttcctcaaattgatctgtagtaaagtgtcagtactcagtaccggtcatgtagctcgcaaatgtactacagtattcatagacaatgtccttcttctactttaggaaatttattatgcataaaaaaataagtaattccgatccatgtaatcttttcatgaataatcctttacatggaattacttactaattttgtttgattctttaatcttccgtttttctttgttcaagtttaattgtaatcacttcgactgctgcaaatattatcatataaaatatgcatgtttttatgtcagatctaaagtgattgtttacatctataaaaacaaataataagcaatcacatcgttaattagtagaattaactatttaagggaatagcactgctattatttaagactataaattattaagaggtactttatgtaaaagcttcaagtcgtgtacgtatgctcaagattttgcatcaaatagacgcttcaatacgtcaagaatatggttactgtttattacacataatttgcaatattttagtatgaactacatcaattttgtcccgtactctagacaatagtcaacagtcgaatatatatacagaatacagtatgacgagatgattattttttcttatcaaaaaacaaaaacattggtcaaaacatacgtatatagtatgacgagataattaatttttcttatatcaaacaaaaatattggtcaaaagatacgtatgttttattttaagcaatggtaagtgacctaaaaatactcgtaaaagacgcgccaattttaattaattaattaattaggtgtctgaagaccaaaagtagccggctaccaacagtacttttttaatttgttgaggttaagtaatcaatctttgcctataaacgtggcttctaatgctctttcttcgcagacctatccacccaaaaacatagagagaaggaaagaaaaaaccaagtggatagagagagtaggtggttgtaaaaccgctaaactgccttgtgttagagaccaagtcaaataaatcaaagctcaattccttagtcttgtatatataagtcataaccataaaaaccaaattcatattataaggtgaaacattggaactcaaaaaatcacaagccaaagacaattacagcaaaaaaaaaaaaaaatcatttgtgtacaagcagaaagagactaaaagtctcgtgaataatcctaagtt

SEQ ID NO: 288 - DNA, 2000 bp, Glycine max
  source 1..2000: mol_type = genomic DNA
atttgttagattgcattaatttgaattagacaaaccatttgacttaagaatcacgggttagttttaagaagaaaagggaaaagaagagaaaaagatcaaaattttgggttggtgcagtttactagggaaaaatgaaattaaggagctaaaagagacgtttgcttgagtgttctgcataaaggtttccacctctatactcaaaagaattgagtaattaaacccttttggtttacacatgttttcttctcacgatgactgatctatagatttcgatttgtttcctaaatttgtagcaaacccattttctctcttcggttaaaccgtctctaactactctttctcttgcactctacactgtattggcctcgcaagaataccaataataggacttttgcatatatatatatatattcattaaatggtcgtacgtacaatagactaaattaagtaggtagggctgtgtacttactttcctttcactcatatatttaacctatggatattggtaggaatatacgtcagtacgtaataatagtctaatatataattagtaagggacgagccattaataattcaactaggaagaaaataataagtattttgaatggtgaaatgagtcagttttatgttagtacatgagcttaagtttatttagtatataaacttattttaataattttttataagttagttcaattaatttagttattaatttaatacttatatatttatcattactagattactagattttatatcagtacaatgcaagaatttgattaaatgatacttttatgaatttaatatttatgtgctaataatataaaataattattttaaaatgaaattattatctaattataaaatattattatctaattataaatgattgtttgaattattttaaaataattattttaaaaattatcgtatttaagatttaacataaatatgaagaattttgattgaatgacttttaccggtgcatcatcttttttctcattgtattatgtcatcaactattatctttttttggtgtgttgaattcactcaactataccagtactagtactgtagtactactactcaacaatataactatatatattatgtatattactcagcaatatataaattcaaatatccaataaagctcgattttgtcgggggaaagtaataacagtaagtgcataaaaaattcaaaatacatgattcacaaagggataaacaattgacaaaggaatatttaactgcgtcatgatgacaaagttatctcatgattcacctcctgatttccaaatgatgttttgaaaacagtactaaaaaataacctttcatcttgttcaggttcgattaaaagaaagaaagtattatacatgacttaaaaataaccttaacatcttgttcaaaacgtaaaagcttcttaataggaaccttatttaatttattaataatattggaattcaaaacagcaggtcaaactaccatgtggcctgtggatcggatgtcaaaatacagatttcatgagtgaactttcgagtacaaacccaaacttttatcagcacgaatgggaagattaaggttttgggtaaaagatagaagagataatatataaactactccactctgtaccctctattaatccttcaggcaaaccaatggcaatagcaagcaagcaattacatgtaagagtggatataattaataaataattaagaataaccaatctggtaaagttttattaattaaatcactccaaaacccttctctcacaggaaaaggtgcatgcatggatgtttctaatttgctagtgagtcacaacacccgtacagttcctatataaacctaacagcgactctagaaggccataaaattcccaaccacctctcctaaaacctttcccatcatatcatcctataaatatatataaaaaccccttcaatcaattcaaactccaaataaccccaaaatctcaattaaaactgcccaaacaacataga

SEQ ID NO: 289 - DNA, 2000 bp, Glycine max
  source 1..2000: mol_type = genomic DNA
aaatttattactgatattgtggtcgatgtttcgaactgtcacacaaacaatattatttgtggttttctttttagaatttgttttattcactatgttattatctcattgttattttcaaatattatttgtgattttctttttagaatttttttttattcactatattatcatctcattataagtgttattttcagataaaaaattgttgaatttgagaaaacttaaagacataattttgttagtattttagtctagtactttaaaataaaacgttaatgtaattatttttgttatatttgtaatgttcattcagtttaaatatccataatttgaggatatttttattataaagatgagttgttgttataactaagcacattacaaataccatggattaacttcttttttttgttctttcctaaatctcaattgcttaatgggaggatttgaaattttggatgaatttgttatttatttgagagattaatttgttgattttaggttaacaatccattaatttgaggttctgaagtttgaaacttttaacggattcagatttgttatttggaacgaaatgaataaatcactagcaggggagtgaagagtggtgatagcaaggtagggatgagcttacaaaattaggaaaaaacaaaaacggaaattttttataatcagaaaaagaaattcaaatatatataaaacaaaaaccagttaagcaagctttaatctcaaccattaaatattttatgaataaattcaatgatgataataggtactttatgggtgagagaaaaattagtacttcaccttagaattagactcctactttttcttccatcccttctcccgatacctgccccttaccataaaaggagatagtactgcaccacctgtcccctccgcatttaatgtttgatcagagaagttccactgcgttaatttcaacaacttaactaattaaatgatattgagggatacacgaaatgaccttaaacgttccaatttacgcgacttagtgtgtaagaatcaactatacttaagccatatattattaaaaatgaaacgatgaaaggaattttgatagtgtgtccctttacatatttagtttacaggattaagacaggtttatcatatttcaaattcaatacaaaacgtcaatgttttcaaattcaataccgtatgttactaatagtcacactaactgaataaagtcatgatatatacaatcgatattgattatcctattatttcattttcaacattaaggtacaccacaaaatgtttgtcattttttacaaagcaaattagatgaaattttttttatagaatctaccctagaaaataaaatagcacaagcatgtggtttgggtgcgtgtttcagaataatgagaatttcccttaatctttttttttttttgggtattgatatctgacaaaattaaggaaatcaataggttttccagattcaatgagaaaattaaaaattaaaccttatataatacaaacgacgatatacaaatttaaacacacacatgcagtaagataatgtagataatgagaaaaaaaagaaatcctaattgatttatcttgattgaggtacaatatacgatttgtgcccattttttaaaaatcacttgattcttttttcttttcctcacttctcacgttgaatttttgcatccaaaatctttgtggaacttcaccctaggtttttcttttccacaagaattacaaaagctctttatatccattcccaaatacaatatataatagtttttgttgaaaataaacttatatattaccaaacataaatacttcaaaatcaattacaattctggtagcagctcccccaattaagcacacagatactaaacataccatgatatatgtgcatgtccacctaacgtagaccacttttgttttgccaaaaaattccaaccaactctctcctaaaccttctcacaatctcattccacataaatatataaaacgtaccaagg

SEQ ID NO: 290 - DNA, 2000 bp, Glycine max
  source 1..2000: mol_type = genomic DNA
tattgtatacttaacattttgaagtttatcttaaatgtttaatattatgtagtatcattttatcttttaaagtaatattttttttttgtaatatgtagtttttgttgctctgttagtaataaacattatagtaatttataacatttttcctatgaaaaaaaagtaaaaagtttgctggtttttttaggggtcaagaacctgatactatctggccctgagcttttgcaccaaatcattgggtctagttgagaaccaactttttatttaagtattgggctacaaacattaaaatgcaatctgttaggggagaggccctaccaataaaatggtgcttaactggcttcaactaagggttcaggtaaagaagaaaaaaaactctaaagaggcaagttatcttacatattttgaagaatatatatgtgtattcttatgtttgttatcaaattttaaaaaattatttctgggcataaaatattcttacgaaaaaaaataactttcatatttccatatttttattctttgggaagaactgaataagttgattcccttaagatgaaaataatattatatatgtaaaattttcattttttattcttttaatttctgcactcctttttttaacaaaaataaaataattattaattaaaaatattttcttaaaatttaaaaagttttatttcattattatatttgaagaatattatttttagaatgaagatagaaaagttgaaaataaattctcctgaggttcagggaggaatgcaaaatttatgattctacgaatgaataaagatgctacagcctacaaataaggaagctaactcttaaactctggctgaatttaaaggacagaagattatcctaatatgttgcaacaatttattctaattgcacaaataaaagaagtacggattaattacaaccatcagttttgatgggttttatatctcattgaatagtttttatctccagattatttataaaaaaatactgattaattaataatttctaacaaattttagtctgtcacaagtattagaaccagagtattagagaagataaattatactatgatccgttaattcgccaggtcacatcttttaagttgtccacgtcgttagtgagagtgtaactatcactcctctaccaatattaagccatggacacatcaattgcataattttttatattgtgttgaggcacacactatttgtcacatagtgttcgttttcatcagtatactaaacttttgtcttcactcattatagtttttaccaattcttgatgaatggagaaatagggtacatgctagtttctttaacataacataataattagttgagactagtagattttttttttttttttgaagcagactatagattgttctttagcctgaatacgagaaatgaattaaaattgaacaaacacggactcagtgaacatggtatcatatatatggcaatatatccggaggaagatgaagcattaattatatgtttatgcgcatcttggccttaaaccccatggggcaggggttgatactacctccctccgtttctttttcataagaaacatgttataggttattttataaataggaactggggtattaatttgcaggggaatatcattactgttttttttatttttattattattattaatattgcatttgaataccttcattgttgactggttctctcttcagtctttaccttttttccccctaagaatagccaactgagtagaaatagtgagcacactgattcaaagtaaggagagggcaggtataagatagctaaactggaaacaaagaaaaaaagcctagtcagacaaagtcaatcattcaaaagttacaacccatgtaatgtgtttttaaaaccacttgttttgtgctcacttttgacatcttcttctctaagctataagccatatacaccaaatattttttcacttgctctccatcttttttcagttcatcagtggccaggtaggcc

SEQ ID NO: 291 - DNA, 2000 bp, Glycine max
  source 1..2000: mol_type = genomic DNA
cttaaattaattaagcctagagctaattaaaatctaaacctgtctaataataagatacatctattattaatttaaaatgatataaatttataaaatattttaatttaagttaatagtaatttttaattcttcacttttccgattactttttttttattgttttggttctgggatcagaccacaaatatcttctaacccaatgattccagaaaattttccattaaaaaaaatcaaacacaaattttctattaaatatattattttttcgtgtaaatacaacaccatcttatattattttttcaatcttatgggttactttgactgttacatgatgttccacggtttttttattattatttattctcacttccctttcataaaccatacgaagtttcagaattcagattcgtccaaatctcatacgtacgtacgtagtaattactaattaagtgcggattagataccatacgggaaatgtcttttaaaaaaaaggcaccatatggaaaatcatgcacgcctctataatataatactagtaataatttatttgcgagcaagatctatcatctaaatgcaactttaatttcataaaaaaatgcaattttttgtagtaaaaaaattaaatgcaattttaaataaaataaccagagcacgtaaattattctgataatttgatttgagaaaatatttttatctttatttttaattaaaaatatcaccttattttaactgtattttctatttttaaaattttacttaagaagtgagaaaaaatatttcattattttctatataatataaaaattaaaaaaaaaaagtaattttataataaaaataaagaagatactttcttaataatattactcttttctattacatttgtgtgatagagagacaagcaccctaatttacgtgagactgtccttttatcattacttcggaggatgtgataaaacttcttggtatgtatcactttcaatacataacgatatcaaagcaccaagatttcaagaatgctatttatatatgttttattaattatttatatttgttttgaaaattaacaaaaaagaatacaaatttctatgcatttaatttttacctttttctttcaaagtaagagatcaaatgtgaagatggtgtagtatttttttatttatttataaacattgctcatgatctaataaccagaaaagtagttcactactttatttttagcattgcttaaaggtttaaaaacttccgcagtatacaactcattgtcctcataatttcatcatgaatggctccactcgattgttaaactgttttgtttttgcttttttgtgaggtagttccttccataggacaaacatgtatacgacctggttctttctcatgcgcaatcgaagagctagtcactcgtctaggcattacgtaaccaaagaaccattcaacgaaatgagctaggtttgttcacttcaacctttctttcacctttggtcccactacttgcaccatgcacgaggtttatgatcacaaaacccatcccatctaacaataattcatatccccgttacttcaaaaaaataatatatgagagagactgcgaattggagtataggtcatgcgaacggatcgatcagagggtaaataaagagttacattattcttatacatgctttttaattacaaatattttcttataatttatttaattatatatagattatatatacactaagaaggacaataagaaaaacagtggtctacttcctggaattttaaattcattcattattttaggcataaaggaatatcttttctttcattcacatacctttttgaaaccttccagactccaaagttctctctctccttctcgaggttatttctctctcccctttctccttctctttatatataaacatctttattatcattatcatcaactcaatagagattggctttacttgaaactcagaccaactgacacagagagagagagaagcatagcagac

SEQ ID NO: 292 - DNA, 2000 bp, Glycine max
  source 1..2000: mol_type = genomic DNA
gcatgcatgttcatataaacaaaaatattacagtaactagttgaagaattgtggaatccctaagctatatttcaaatttatcattctagttagatgattatttataagaataggacggaggttatcatgtttatttatcggggatggccgcaagtttgtcttgtatataagactatattttatttaaattcaattttcatctgtaattattggatagagttgtaatagattatatttttaaggacaactttttcaaaacaatatataattatcaatcataaacataaatataatagaattatggagggataacaatagacatctctgtatatcaaatagtacatacaaattacattgacacttgtataggatttgttaaatgtctcttgatatatattcctaacttttttatccctacgctaactcattttaattttttatcagaaaaaaaaacattttaattatttaaaaatattaacactcgttatacattacattaacttcattaattgtttaaaatctcaaggaggtgtccgggtatatatgcaatctcaagcataatttactctatcaaatattccattaatactttttttgatcacatattacccattatatcatgtgttgaatagagtttggcgtttaacaaattaaacttttccaaaagtcttatatataagaaaggatatttgccatcttgttttttttttttaattgataggttgcattatatgattctataataaatgttaaatttccaaaaagaaatattgaaattattagaacgatgctagtaatataatatcatattacaaaattatcctaaatttaccatttttaagaatttacgtcatccattcacctcctcgcaatagatgaatagataatgatcgatccgaaattacattaatgaagaaccattaaaaaaaggatcgagtctaaagagctatatgagcagtgcaagaagcagctcataattgaaccttccacttgacaatagtttactcctgactgggcccattgcttgaaaatgtgtatcactagaccatcgttttcaagggaaaaaaatcatacacgttataacttacggcagactttggatacttaaaattgtcacaagttaaaccccttcttttaaaagggtcctttgtatatgcgtgatagaagcaccgtcattgattcaatcgagacacggaaaccataaatcaattaactagcaaaacacttttaacccgatatatattagaatttttaaaaaatatataatatacttaacataataattaatttatatttttatactcgtgatcaaactataaaatatgatataatcgtttattattataaattattactattttattaaatattatcattaaattattaaataaacttattttttagaattaaatataaaaattatcaaatgattataaataaatatgttaaaaatatacaaaattcataaatattaaatcataacatgatgaatacaatgataattaatttttatatattattatcaagataaaaaaatattatgagaacatattatatattattaaatgattaattattaacagtatatatgaattgaaggaaaaaaaatcaataagatcaaactaggtcaacttaaatcgggttaccgattttgactaaatccaagagaattaaattgaggctaaaccgaatcaaatgcatttttgattcttaccttaatcggacccgcccagaacacctggtaccgagtcccacaggtagggagggtcctgtttttataactatggatagaaccttcttaaggctaatcaatgatataattttggaaactgacaagacaattgaagttagaggctgttccctttgacttgtgccatttcttctctcaataaacttctattgatgccccgctccacgttccattcttcagtatcctttgtagtttgaaccttcctcacactcccacttcagaaaccaatcaaagagagagagagagagag

SEQ ID NO: 293 - DNA, 2000 bp, Glycine max
  source 1..2000: mol_type = genomic DNA
aaaaccaatggaataaagttcgcttatattctaagttcctcctctattgcttcaaaaatattggacttttgaaacaaattaatgaaattttaaaaaaattaattaaaaggtacgttgtaattacttttaattttcattatcatgtctcaaagtaagcattgtatactttaatttaactcaacttattataattttacctttccatttaatatacatgttgtgcgcataactttttattataaaaatatgtttaaaagaaaaaagaaacttttaccaaatgttccctgcaattaaggcataaaaacaaaacaaaaaaacaaaaaaaggaagaatgaaaaagatctacataaactcgtcaccattttcaatcccttacacttgtaaactagtcggagattaatcagggtcaaaccgtacgtactctttgaagcttacaagaacaacatctatatatcttctagcattgcttgcttcctatgcttaaagagctcatagtcccttttccaaatatactataagtgcgttttcgtcttttaacatctttttgtcaaaaaattatgtgcatatcatgtgcgtgtaaccctgttaaaattaactgctaaaatgaatgaaaaagaaaatttacaataaattgtgttaaattaaggttagttaattaaacttcactattaaaatggatggaaaataattttacaataaattatgttaagttaaggtgtattaattaaacttaatttgatataggaggatggaaagttaattaattaataagataatagttaagggaaaaaagtgttttttacccgtattttccttgtatttcattcccctaataaatccccccctcaaaagaaaaatctttctatttttttttcatttttttaattatagtttcccgttattcaagtgatacaacaaagcaactcaaagaacgttacagaaacgtaatacgtgagaaaaattttaattatggacaaaaaaaatcaaataattgaatattgaataaaaaataactattaatgtaaaatataatgttacaatgcatttttattacattttcatttttttaactattgatttattgaggatagtggttaacaaaaatgatacaaaatttatcatggctaattggctatataggcaagagttataaaagaaaactaatcatactttctaacttgttaaatcttttttatttcttatgacttccagtatccgaacgctatattgggtattggaataatctaaattaagttgagggaaatcaatatgatgaacagtaaactcgatctcctccgtttttaatgccaaaagtgaactttggtttatctaaccatactagaataatgtttatttgtatttttgagtgaatgttaaaacaaatacaattgtttgaatcaaatggtagaacaatttactccataagcaatttataaaatcaatatctctacatcctatgatccctggccaaataaaaaaagtcagcagcatctcatgttaagataatgttccaataattgatgctaaaaagtttaaggagtgcaatgtgtttacacaaaaaaaaaaaaaaagaagaaaatgtacgatgcatatagcaattaattttctatagaaacaggaaatagtgaccaaaagaaagatttataggcatgtcgtatgctcgtatatccttggacatcaaggggtcagagtggagtggagtggactcaaaaaaggtgcaagaaaatttgattccggtttaagaaagacaagaagaacgacccttattctcctaccctagcaatactaaatagctggaattttctatataatcacctttgttttctgccacacccttatataaaaaatttgtacgatgggatgttcaattggaatcatgtttatccgctcctagttttataattaaataacactctctctctctcaattatttctgccgtaaatagacaagggttatctcaaataatcaatctaagctagctgaaagcaacaacaacaac

SEQ ID NO: 294 - DNA, 2000 bp, Glycine max
  source 1..2000: mol_type = genomic DNA
ttatagactaggtagcttccttgagaaactttcttaagaaaacttccttgagaagtttctttgagaaaacttccttgagaagttagagcttagctacacacacccatctaaaaactaagctcacctccttgagaagctagagcttagctacacacacccatctaaaaactaaggttacctccttgacaaaatacatgaaaatacaaaggaaaagtccttactacaaagactacttaaaatgccctgaaatacaaggctaaaaccctatactactagaatggtcaaaatacaaggcccaaaagaaagaaaaacctattctaatatttacaaagaagagtggatccaaccttgacccatgggctcaaaaatctaccctaaggttcatgagaactctagggccttctttagtagttctagcccaagtctcttggagtcttctatccaatacccttggagggtaggattgcatcagtgagcgtggggggtcagggagaagcagggtttgcgagaagagagaaggcttttgagtttgtaagtttaagttaaaccacaacatcgatttaaaaaaaaccgatgttaacataggcttattaacatcggtttttgaaaaaaaaaacgatgttaacaattatatgttaacatcgattttttcaaaaatcgatattaataaactggtccacatttgtgttaacatcggtttttttaaaaccaatattaacaattatatgttaacatcgattttttaaaaatcgatgttaataaattaatcttaattacaagtatgtcatcgcgtttgtgttaacattgattttattgaaaaccgatattatcctagcgatgttaaatgtatagtttttagtagtgaattactagctagtgggcattaggtcaccaaccatagggaaaatatgcgctgatatataatataattataattatataatatttaatgatttgcttgctgcatctgtagttatcaatctaaatttcatagctggttcattctctataataaataataattactctttcgtcgtttctcctttgtcaacacttggaatccaaacttatatattgaagcaaaaagatgatttgataatcactttaatttattagctcgtttttttttattattgatatagctcgatatatttagagagagagagagagagagagagagagagttttgaacactttaacgttctacgtacccttggtcccataggcaacaattacacgtacaatacatgatgcttacgatcatcatcatcatccattcattcacgacaattaataatgtgatacccccgctagctattttctaaaataataatataagagagacctaagaaacatataggtgaatggagagtataaataaacgagtcctattatttatataatgaattcctttacaatatttttttatcaatcagtttatcttatatattctctttttttttgtataattatttttataagaaaattgtacaaaaacgaattttctaaataaaatagattctatacaaattaagaaagacaatggtaaaaataccagtcttcgtttctaattcttccacaaggactcaagtctttgggctctctttttcttcacttcaacgatgcctttaaataaaatattatcagccattttagctgacacttgtcgacaagggttcacccctagtaccctttttatattcattaaaaattatcattgttgagattttcaatttatatttattccaattaaactaggtcatgttattaaaaagtctacatacataaaatgaggaaaagaaattgaattcctttaccaaaagtcctaagttttcttttctgtcgttcttgctcgaggcaattactctctctttctctctcccctcctcctttatataatcgtaattattatcgtcattctcatcaagttacaataaacattggctttacttgaaactcagatcaattaacagagagagagagagagaagcatagcaaac

SEQ ID NO: 295 - DNA, 2000 bp, Glycine max
  source 1..2000: mol_type = genomic DNA
gttggagccaagattggaccttgatccattttggttttggtaatgaaaaacccttcttaaaatgttaaaccatctcgctctagatattctcaggaggagtgacacgtggaggcctgtttccagcactagccactctatcttctgtaaatgtaacaatgctaaacactcttgttgtgtagaattcattattgcgcctgtgttttgagaacttgaaatgtattcaacaccacacaaaaaggggatggatggaactacataaagaaataaaaggggtttgaaacatgattccattgataatctgtcacaaatatattcaaacgatagaaaaaaattttaaacttgaaagggctaatttattttaaaaggtttctggtttacagtattaaacttgaaaataatttctcttttggattcgttaatatcatattctcgaaatatgatatttcttaattgccgattttaactagatcacaatttatatttatgctagtatttctattattaatattaataatatagaatatttatcgattttatttattaataataacaccattttggtagaatcttgtaaccacggtttttactaatgtatataaatattaaatatcttggtcttgtattgtattgaattatgtaactttgatgaaattgagaaggttgattaataaaatgcatacaaactgaattatatatcatatacttgtacaatctaaccgacggcaatattgaaataggcaaatgttaagcactagaatgctgactgaggaaataaagtaaaaaatattaaaagaagaaagtatatatatatatatatatatatatatatatatatatatatatatatatatatatatataacccatgcttttttaccattgcttgctctttgacaaaactcggtaaaataaggctgaatttcattagatccggttcatagaatttcattacttggatgcgtagtttttttttttacactaattggatgagtagttcaaaaataaaatatgataaaattcatttattttattttattaaaaatcttttttttcttcgttcaatataaaaaactacattttttaattatacatttgattctattataaattacttacataataaaataataatttaagaacttgattttgataaaaaaataaataaaaataaggatcaaaagtgaattttttaagagacaaatgatcaaattgtacaaaataaataaaagacttaaatatatttttcttttatgtaatttagcgttttcttatttacgtcattgcaaaaaaatttcattttattttttgcaaaatatgtttgttttattttttttccttaaaatactttagataacattttgaatgataaaaagatattttgaacaataaaaaaattattttaaaaataaaaaataaaacaaatacattttatcaaaactagaaaaataatatactagaacaaaaataaaaaagctagattataaagaaaaaaatatatttaaaataaaataaaagactaaaatcatcatttaagctatattaaaaagcctccaaaagatagtgttagaagttagctattcgtatttaaagaatattatccatacattaattttctcttctattccatttttctccatggttcttatctatgacattcattaatttgtgtcttatatattcctattcttgtaggaataggacaggacaggtggaattgggtcttagtagggttaattctccctccttcatctttggttgctctgtgtgtgcagaactgaacaaccagcgttggtccctgcccttccactttttcatgcttcaacaaaggacagaaccatgataaacaaaacaaatatcagtgtattgtgtcagtcagacaaagtcaaactttttcaaatgttccaacttccctatccattctagtctagtgttttgtatgcttttctttcttcttaaaaccatattatattttgtggactgtgctaattacttttgctggcc

SEQ ID NO: 296 - DNA, 2000 bp, Glycine max
  source 1..2000: mol_type = genomic DNA
tactcggcatctatatatcttctaggattgcttgcttcctatggcttaaagagcttatagtcctttttccaaatatatactataagtgtgttttcgtcttttaacatctttttgtcaaaaagttatgtgcaaagcatgtgcgtgtaaccctattaaaattaacggctaaaacgaatgaaaaagtatttttactataaattgtgctaaactaaggttgattaattaaactttactattaaaatggatggaaaagaatttttacaataaattgtgttaagttaaagtgtattaattaaacttaatttgatataggaggatagaaattgaactaataagataatagttaagggaaaaagtgttttttacccatattttccttgtattcgtcattccccttatgaatttataaatacccaaaaaatattttcttctttctatttttttcattttcatttctattaattattgtttccgttattgaagtgatacagcaaagcaactcaaagaacgttacatcgacgtaatacgtgagaagagttttaatgatagacaaaaaaataaaataattgaatattgagcaaaattaatgattaattgaaatggaaagaattaaaaatagttaatcaatgtaaaatataatgttacaacgcatttttattatgatcttcaatgttttttttaccaattgatttattgagggtagtggttaacaaaaattatacaaattttattatggctaattggctatataaatcaaagcaagagttataaaaaaataatcatattttctaacttgttaaatctttttttatttcttatgacttccagtatccgaacgctacatggtattggaataatctaaattaagttgaggaaaatcaatatgatgaacagtaaaatctccttcgtttttaatgacatgctaaaccatacatgtgttttaaaatagaaccttgtaacctttcataattatataattagacttgctgcatgaaatttatatatatatatatatatatatataatgctttaatattgtattctcttcaaacataaatcactcactgacagaagtgtttggattgttaattttttagaaatttcaactcttcctattcttctgtccaaaaacttatctaaccatactagaatatgcttatttgtatttttgagtgaatgttagaacaaataaaattttaaatgcttctggtatgtcttcgtggggggaaactacagaaactcgatcctccatcgatccagatttaaaaacttaattcaacgtcttttaatgctattactctaccataaaaaatatgtagttgaacaaggtgataattaatatttgttttttataacaaaattgaatcagatggtagaacaatttactccataagcaatttataaaatcaatatctctacatcctattatccctggccaaataaaaaaaagttgcagcatctcatgttaacataatgttccaataattaacgctataaaatgtaaatcatggtttaaggagtgcaatgtgtttacataaaaaaaaaaaaggagagcaatgtacataccaattaattttgcatagaaacaggaaatagtgaccaaaagaaagagttataggcatgtcgtatatatgctcgtatatccttgtacagcaaggggtcagagtggagtggactttaaaaaggtgcaagaaaaaattgattccggtttaagaaagacaagaagaacgacccttattctcctgtcctagcaatactaaatagctggaattttctatataaacaccttttctgccacacccttttattaaaattgtacgatgggatgttcaattggaatcatgcttatccgctcctagttttataattaaataacactctgtctctctctctctcacacacaagtttctctctctttctcaattatttctgacagtaaatagagaagggttatctcaagtaaatcaatctaattggcactagctgagagcaacaacaac

SEQ ID NO: 297 - DNA, 2000 bp, Glycine max
  source 1..2000: mol_type = genomic DNA
attgtctgaatatctaatccttgtttttcggtttaagataagaagagcataagaataaacaatatcatagtcgcacatttataatttattccttaattcccccatttctgttttttttttctttcgattttgaatggaattccaaattcgatttctaaatatgcaaaaatggtttgcaaatcttctaaaaataatttcacatccaagagagagtaaaaagttccccgggttcttttaggggtcaagaacctgatactatctagacctgaacttttgctctataacattgggtctagttgagaactaataacggtatatttgtgtattgggctacaaacataaaaatgaaatttgttaggggagaggccctaccaataaaatggtgcttaactggcttcaactaatggttcaggtaaagaaaaaaaaacctaaagaggtaagttatcttgcatattttgaagaatatatgtgtactcctatgttttttatattataaaattaaaaaaaaaatattactaggtataaaatattcttgcggaaaaaaataactttcatattttaattcttagggaagaactgaataagttgattcccgtaagatgaaaataatattatatatgtaaaatttcattttttattctattaatttctgcactacttttttcacaaaaataaaataatttttaattattaattaaacatattttcttaaaatatttaaaaatttgattttattattatatttgaagaatattattttttgaatgaaaatataaaacttgaaaataaaatctcctaaggttcagggaggaatgcgaaatttatcgttctacggatgaaaaaagacgctaaaaataaggaagctaactcttaaactttgcctgaatttaaaggacagaagattatcctaatagcatatagtcacataaataactctatttatgtgacctcaattttaaataacttaattaatttttttaatatttatttttatttataaattatttaactcacaaatattttatttctcttttatatttaatttaaagttaaataactcgtgagcaataattatttatataaataactttctttaattttaaataacttaaaatcacatataacacaccaaacaaatatattttttattaaataactcccatttagatgctctaatatgttagaacaacttattctatttacataaatcaaataaatattaattaaccatcgatgtaaagggtgtcgccagcagtcctcttcccatattaagccatggacacatcaattgcataatctttgatattgtgttgcggcgcacactatttgtcacatagtatttattttcttcgatttactaaacttttgtcttcactcattatattttcgaccaatgcttgatgaatggacaaataggttacgtgctggtttctttaacataacgatttaattagttgagagtagtagttttttttttttttttgaaaaagactagagattgtttctttagcattaatacgacaaattaattaaaattgaacaaataggttaacgtgtatcattgtatatatgtttatgcccatctaggcagcttaaacctcatggggcatgggttgatattaatttgcaggggaatatacatcatcatcgtcattattattattattattattattattattattattattattattattattattattattattattgcatatgatcttcactattgaatggccaactgagtagaaatagtgaggacactgattcaaagtaaggagagggcaggtataagataacttaaatggaaacaaagaaaagagccaagtcagacaaagttaatcattcaaaagttacgaaaccatgtaatgtgtttttaaaaccacatattttgtgctcatcacttttgacatcttctctattctataagcgccacaccaaatatttttcactttctctccatcttttttcagttcagtggccaattgtaggct

SEQ ID NO: 298 - DNA, 2000 bp, Glycine max
  source 1..2000: mol_type = genomic DNA
ggaggggtgacacgtggaggcctgtttcgagcactggccactctatcttctgtaattgtaaacgtaacaatgctacactcttgttgtgcagaattcaatgtgtctgtgtgttttgaaaactcaaaatatattaaacacgacacaaaaaggcatggatggaactatataaagaaacaaacggggattgaaacatgattccattgataatctgtcacagaatatattcaaacgacacaaaaaaggctaatttattttaaaaggtttctggttaccattttattaaaataggcaatggtaaaaaatgtagtttcattttttaaaattgaacgaagaaaaagaaaggttgtcaataaaataaaataaaatgaattttatcctattttatttttaaactatgcatccaacgaaattctacgaaccggatccaatgaaattctgccttattttattgagttttgttaaagagcaatgattaaagagaattatatacatgataatattaaatgttttgaattaagtagagatgtttgttttacggatagactttttagtccacacaatagaaaaagaacaaaaataattccatatttattacggaataataaaataattaattcataatatattttttactttgataagcaatatttctacctttaccccatatttaagtctggtagagggattaaaatatctattttcatgagacaaaaaaaaaaattgagtaaaaattcacttataccctctttctcttcctatccagtgttacactctcctttcatcccttcaagttctataatttttttcattttcaaagtttttgttcatgtattaatctttatttatcgtcaatcttgtaaattttactcataataattttttgcttttcctcttattgttccttgcatgtatgatttggtgtggacaaatatttctatattttgggtgatactctaaggaataataaatgagtagggatatattttgtcatgagaaagtgaaatatataacatttcgaattcaatttgtttgtcatttgttggtatcataataaagctatttgttttatgaaataaaatattatctttaacataataagaatattttagtaattataatatatatttttagaaaaaaaatttaaccaaacatatttcttaattatttctcagaatataaaaaaatatttctaactaattttattattaacaaatacattgtttttattaaatacccaaaaataacattctcatgtttcattcatgagtttaaaaaagttatctgtcaagtaaatattcccttaatattttttacttgtagaataatatataaatcactcttcatttttaacacttcatcaagatttctcatttatgtttatatctcttttatattacatcataaattttattatacctatatatatattttttttcctttttcctttttctctctagatataagataatatggtgtgtatcaaatatttaccttttactttattgagttttgtgagagactaatggtgaaaaagcattttccaattttaataatctgtcataaatataaaaattactccatataacccatgctaagttgaatgtaatcttacatttcattttcttggccataattattaatctcgttattattgggataggttaaacaatccctccaaaagatagtgttattcttatggtaaataaatgtgcacacgaataggacaggtggaattgggtcttgggcagggttaattccttcatctttgtttgctatgtctgtgcagaacgcaacctgcagcgttggtcccagtttgtctgtccctgcccttccacattttcatgttgagcaaaggacagaactaagtaaaacaaaatcacagaggaaattaaaagagcttaatcagacaaagtcaaacgttccaacttccctatccattctagtcttcttaaaaccatattttgtggactgcaaatttacttctctgtgagttcagtgtc

SEQ ID NO: 299 - DNA, 2000 bp, Glycine max
  source 1..2000: mol_type = genomic DNA
tgttgcaaaaataagtattttttgaaaattttccttaaattcaaagaaatttttaaaaatatatgaaaagtgatataatattaattattaaaggcttagttatatttttttgttcatgtaagttaatattttttttccttttttgtccctataaattcattttctaattttagttcatgtaagttagtgttttttaactttggtccctataagatattttgtttatttttaattcctgtaaattagtatttttttcaattttggtccctttaaaattaatttttttcacttatagtctctacaaattcacacttacaacaattaaaattttaaaaaaatacaaacttagagagattaaaaataagcaaaatatcttacaggaccaaaattaataaagcaaaaactcacaagaactaaaatttaaaaaaaaatacagcaataaaaaattaactaggaccaaaaagatatttaaatcattattaaatataaaataaaaatacttagtttgagtgatagagtgtgtatgagaggaggttccaatcccaaaaatgatggcccagtcacagaatgttttggcccaaatgtattaattgagctacaaaagttcagcatttgtttcatgcaattctcattacattatgtaaaaccaattataaaatgcaaaattatattttggaatgggttttttgaaaagatgtatatgactttatgatacttctagataagtttttttctttttcttggataatagaatacatatgtctccaaatttattggattaaagattaattttattcatgttgtatggttgtcattagtttaagaaaattttacaaacatgaagaacatcataattctcccgttaaataaattgttcccccacttggaaacacaacaagatcttagatgattttctcaatctatgaatttttttataagtcatttaacaataactaatttagaatatcttatattttattttaatattttagaagataaatagaatttaaaatacttataatgttggcttttgaattttatcaaattttttatttaatctttaaaaaatcactatattatattaaatattcaaaatcagtttccaattatgtcaactgtgtcaagattcacaaaagtgaaaaaaaaaaaatctcttaaaaaaagatgatttgttttaaaacaaactcaaatataatacttaatacatattcatctactagaagaataaaaatgcatattttaaaataagaggagaagaaaatataatttaagtatattttaagagagaaaatgtaatttacatttttttattatacaaatcagcgaggacgatgtttagaagttttacatagtttgtttagacttattttattatatgcacccttaaaacacgtatttgattaagtttagcatggcttatatataactcttttgtaagttttatttttaatttaattcaataaattatatcaaaacaattttattaaaccaacgcttgattaaacgtatgattataatatgagtcggaagcaacacaagctttttgttttgtcccagcttagagaccatgatatcttttaacccctttggttataaactaatatttttttacaaggtaatgagaacaaatagcacataattggacttccaagttgacatttgttttcgaagacttggcccatcccttgaaaaaatgtgtagcaaactagcaatacataatcactttcgatgaattattattattctatatacaactcggggagcagactttctatacttttatatacaaactgtgaatgcagtgaccaatttaaactttgcaagagggtcctataatatagtagtgatggaaacttctttcattcaattatgagtttagaagcctacagtggtgaaaattttgatctataataaaggctgttccctcgttgacttaagctatataaactttttcaagtgaagaaagagccttattcaagtgtgtgtgtgtgtgagaagag

SEQ ID NO: 300 - DNA, 2000 bp, Glycine max
  source 1..2000: mol_type = genomic DNA
acgaaaaaaaaacgtttttatgaaatataaattattttttatcaactgaatcaatttttattgacgtattaatactttttatttgataatatataactagaaaaatatttttgtaaaatgaaaataatgttattcctttttcgttggcacattaattttaaaaaaattctaaactaaatatatcatttttccgagtgaatacaataatgagaatttacactattatgtgaataatattatgagttactttgccgattacctgatgttccaggttatttatttatttattctcacttccgtttcataaaccatacgaagtctcagaattcagattcgtccaaatctcatacgtagtaattactaattatgtgcggattagataccatacccaaaatgtcttaaaaaaatatcatttttttttaccgtatgaactgaatacggaaatttataacactaacatattttattcaacaaattagactaaattcccttaataaaaaaagataccacatggaaaatcatgcacgtctctataatatattaataattaatttgcaagcatgatctatcatcatctaaatgcaactttaatttcataaaaaaattcaacaaaaaaaaaccagagcacgtaaattattctgataatttgatttgggaaaatatttgttgtttttattttttatttaaaaatatcaccttattttaactttattttttaatttaaaaggttacttaagaagagaaaaaacatttcattattttctataatataaaaacacaaaattatttttataataaaaaatactttcttaataatattaatcttttctattatatttgtgtgatagagagacaagcagaaggcatcaaaataaattagccctaatttacgtgagaatgtccttttatcgttaattgggaggatgtgatcaaacttcttggtatgtatcactttcaatacctaaggatatcaaagcactaagaagatttcaagaatgttatttatatattattttattgattatttatatttattttgaaaataacaaaacaaaaatacaaatttcaatgcatttaactttgaccttttcctttcaaagtaagagatcaaatgtgaagatggtgtggtaattttttttatgtataaacattggccatgatgatttaataaccagaaaagtagttcactactttatttttagcatcgcttaaaggtttaaaaacttccgtagtatacaactcattgtcctcataatttcatcatcaatggcatatggctcgattcgattgttaaactattttgtttttgcttttttgtgaggtagttacttccataggacaaattaacatgtacacgacctggttctttctcatgcgcaatcgaagagctagtattcactcgtctaggcattacgtaacaaaagaaccattcaatgaaatgaggtttgttcactttaacctttcacctttggtcccactactcgcaccatgcacgaggtttacgatcaccacacccacccatccaacaataattcatatccccgttacttcaaaaataataataatatatgagagagactgcgaaggagtgaacgaacggatcgatcagaggataattaaatagttacattattcttatacatgctttttaattacaaatattttcttaataatttatttttcaattatataatatatacacactaagaaggacaataagaaaaacagtagtctacttcctaattcatccattattttaggcatgaaggaatatcttttctttccttcaattcaccttttgaaaccttccaaagttctctctctccttctcgaggctatttctctctccccagcttctccccctgtttatatataaacgccattattattattatcattatgatcaactcataatagagattggctttacttgaaactcagaccaactgacacacagagaaagagagagagagagagagagagagagaagcatagcagac

SEQ ID NO: 301 - DNA, 2000 bp, Glycine max
  source 1..2000: mol_type = genomic DNA
tcattctattgtgcagagggataaagttttgtaatgcacacaatgcattggttgcacttgtgcatactactaaataccccatgtgatgtacattaaatatatataaatgcagaatggaaaatttaggaattgttatattatcttttaataaatttttttaaaataatttacttaagatatttgttttctatttttaggaaacttatttgtgatttgtccttaaaatatgttatcatgaaatattctttgtttaatttgtcttgattatgatttcataattggcgtcggattaggattttacatttaataaagatttatttataatttttattatatttggaaatataaatactctttataaccttctaagttctggctcaacttaattagagtatatttataaaatcctagctagaggaaatactcttctataaaagtaataattgtcctagatagttcttttgaatcagcaattgccttagtattctaactgatactaagagggtctaacttttttttttttaaagaaaaggatctaactaaattgattaaataagatgtatggattgggggttatataaactcttaatatctgttttttgtttttatggatatataataaaaaagtattctaagtgagaaattgttaagtttattgtttaccaaccatccacacaagaatctcatttacgtacataataataagtgtaggaattttctattaaaaaaaagtgtaggaattgagggtaataaataaacgaaaacctcactcccaaattccaaattttaaaatttaaatcggtgtaaattgagatggtgggatatcttttctatgctgtttttttagtgtatccttcgatgggtttggatccttttcagcacctttttccttcattcctctccatcctttttttttctcttctttgtttttccttttaactttaatcccacactttttatttattttctttattttttggctgctgcacaagtgggagcgagagagaataatccaatttgatccttccatgcactcaatagtctagaggctaatttttcataatacaacattactaaaagtgataattatttttattaatattgtttttttgtatacacataaatcttaatatcaaactcaaacatcgtgttttaaagggtccaaattccttttattcaaccaactcatgttgatattattcaaacccattaattttatgaatattcaggtgcgccctttattcaacgcatccttcagctagatatatggatttagtgaatgaggtttgatcttttagttaatttatataaatttgtttgtaggtctttagctatatatatacactttattgatagtctagctaaatacacctggccttttactttttgcaatgtgtcaatgcataatatgcattaattaccaaataatactaacaattaaatagttaaataataaaagcagaagaaaactaggccaatcgtgatattggtcctagtgtttggaaagtgtcacaattctgatagctgtacccatcaattcattagtcctgttgtgtgttgtctttctttctgtattgcatacattggatgctttctctttagagaagaggaagaagagattcagagaatgagtgagtcttcaacgttgaagattagaaagttctctctgactcttagtacccttcttaaatatacttaatttttaacagtgcgttgaaatgtaaacaaaattttgtactactatattttaatttaattttctgtccatatgctttcatttgacttgtgtgcatggctctctctctgtctcctaaatgataaaagtaatatttttttaactgtccaaaaaccggggtccttatttataaggcacaagcgctacccaccaaagcttcattcagattagaaagtgagagtttggattctcaaagacagattgagattttacacagagagagagagagagagagagagagagagagagagagagagagagagag

SEQ ID NO: 302 - DNA, 2000 bp, Glycine max
  source 1..2000: mol_type = genomic DNA
ctccctagtgggaatgatacaatgtggcagggcgtatctgagagaattgttttgcctaattttcacaatataggctagctaggtatcaatgtgaatgaatgtatcattgctaaaaaaaaatggtgttcaagctaccattgtgttgattagtcaatcccaaacacctgatcaaataaatctaacggcaaagaatctgattcgtacatggatcatgcaatagtacaccatgttagatgctcaacagttaacagtgcttgcttctccaacaccaattgatatgattaattaagacagagtctgagcagatacagttatttatattttagtaaaattattaatgtcaaattgccgtgcacaattttttttttccaattgcatagggaaattttcttgtatatacacaaagcattggttgtaggaaattatttgtaatatgtcttcttaaaatatattatcataaaatattatttatttaacttattttgattaagatttcatattttaaaatgttaattggcatttgggttaggattttacatttaattaagatttatttattatttttattatatttgaaatcataaatactctttataaccttttgtctcaacttagagtatatgaaatcctagttaattagaggaatactcttctaaaaaaagtacgtattaattaattgtcctagatagttaataaagtactctatcatagaaatattttaagtttattgtttaccaaccatacacacaagcatctcttgaagtgtagaaattgagggtattaaagatgccataaacgaaaacctcactccctaattccaaattttaaaatttaaacataagaagtgtaaattgagatggtgggatatattttctatgcagtatttttagtatatccttccatgggtttgtatcctttccaacacctttttcattcattcctctccatattcttctctccctctcttaactttaatcgcacaatttctatttattttctttttctcttttttttgtcttctacacaagtgggagcgagagagaaatccaatttgatccttccatgcactcaatagtctagaggccaatttttcataactcatacagttagacactaaaagtgagaattattgttattaatttttttttgtatacacataaatcttaaaatcaaaccccaacattgtgttttaaagggtccaaattccttttattcaatagactcatgttgataatattcaaacccattaattttatgaatattcaggtacgcccttttatccaacccatccttcagttagaaatggatttggtgaatgaggcttgctactttaattaattgatttcaatttctttgcaggtctaattagttatatacactctttttttttagtctagctaaatgcacctgaccttttactttttgctaagtgtcaatgcataacatgcatttgttaccaaataataataattaattgaataataaaagaagaagaaaactaggccaatcgtgatatattggccctagtgtttggaaagagtcacaattctggtagctgtacccatcaattcattagtcctgttgtgtgttgtgtttcttttctgtattgcatacattggatgctttctcttaagagaagaggaagaagagaatgagtgagtcttcaacgttgaagattagaaagctctctctgactctcagtacccttcttaaatacttaattattaacagtgcgtggaaatgtaaacaaaatattgtactatatatattttaatttaattttctgtccatatgctttcatttgacttgtgtacatggctctctctctctctctcttaaaatgataaaataatattttttttaactgtccaaaaaccggggtccttatttataaggctcacactacacaccaaaacttcattcagattagaaagtgagagtttggattctcaaagacagatattgagattttgcacacagagagagagagagagagagag

SEQ ID NO: 303 - DNA, 2000 bp, Glycine max
  source 1..2000: mol_type = genomic DNA
actatgtaacagcattaataggtaggctttgtttaaattgttttcaaaatataagatgaaaattaaaaaaattgttagccttaaaactcataattaatgtgataaaattccatttgcatatataattaaacttctctcatattaaatttaaggactacgatttaatttcgcatacactgatcgtttgaaaattgaggaaggacaaatctcatcgcatattattacgaaagtcaaaatctttcaaatatcaagtagagctagccgaattgtaaagccattgaatagcttccttcctccctcgaagtacatatatatagggatgttcatctacgatatagatcgaagaaaaagatatcggaagaagtaataaataaaaggaaaagaaccaagagtactatatatactatatgggaatatcatcatgtatgatctacgaaatcgaataggacctttgcagagagacctaggtctcttctccattcttatatgtcgtcaagcaacacaagactccctatagtaggaatgttattatagtgtgacaacacagattcgtgagaattatttttcactatatatgctgccggtaacaactatcatgtatcagcattaaatttggaaaagctatacaattgcactgatttaattaattagtcattctaaacacaacacacgaccagatgaatttaagggcaacgaatctgatccatatataggaccctatcagatatgaaacatagtcatcaatattctcatcactcaccattatagatataattttgcatagtggataagaaaatgactaccaatatttaacatgctattattaattaaaatttataagaaacaaaaaaattaagaaaacgactttttaaataaagaaatgaaactgacaaaatatataattaatttctaacaaatttcaattaaaagtagaaaatgcgttcaaaaagtgtattgctaactagttcctcagcagttatgcatcacaaagttatttaatttagcatctacaaatgtttgttagctagggaaagagtgtaagcagagacaactacttatgtataacagagttatgtaatttagcatctacaaatgaacatccagctatatttcattttttttttggttctttagctgtaaagtttaacgacgtggtcgtgtgcagttccaaaagatacacctactgctacacaatgattttctgacaacataaataatacattgatactatataattaagtccattaatatcttgaatattcaggtgctcccttatcacacatgtccgccagttagatggagatttaattaaactactactatagtgcaaagtatttttataaattgcgtgcaccttttcaagttttttcttcctgtcttttatactcgtaatgttttacttttggcagagtgtcaatgcattaattaagaagtaacaattaaatattaagccaccgcactataacgaagaaaatcaggccaattaattccccattttggtccttttgtttggatagagtcacaaatctggtagctgtaaccatcacttacaaataagcctgttgggttatgtttctttctatatgataaactttggacacttttgtcttgtgaattgtgattaattattttagaagaaaaatgaagaaattaaatttgtgacgagtggtagtgttatatggcttggcctggattgaagattagaaagttctccctcagaaatcagaatgaatccacattagaataatagtaataaattaaattatttcgtacatatcaaaacgtcctatccatgctttttcatttcagttttgtttctctctgatacataataaaataacaatatttcaactgttgaaaagctaggtctcttgttataaggccaagcagtccccaccagagtttcattagaaaagtgagagggttaagaagtttcattcggatcgtgagagaggttaagaagttttctagagttgttgtttgatagagaaagagagaaa

SEQ ID NO: 304 - DNA, 2000 bp, Glycine max
  source 1..2000: mol_type = genomic DNA
taatttgcaaaaaaaaagttgattaaatttgtaaatataataatgatttgaaacttaatgtcagttgatcttgtcttttatatatacctaaataaagcaacattcgaactctctaaaccacttgataatttataaatattcttcttactttgtaaattaatgttaaagaataattttaggtctctaatgttgggttacaagtgtgaggtgaagtcccacatagaagtgaaaaggttgagctaagtgaggagaagacccataaaccttaaccgagattttgggttagggtgtggtgtcaggtctccttatgtgatggctcgtggttaacgggtgtacccctcgaagctccccaacaattggtatcagagctgatggttcgacaaggttccggctcaaacgagtatacaagtatcacaagcaagtcacaaatgtgaggtgaaatcccacatcgggtagaagtgaaaagattgagtaccatataagtgaggagaagtctcataaacgtgagccttaagattaggatgtgatgtcaggtctccttatgcagtggttcctgatccacaggtgtacctctcgaatttccccaacatctaattgatatatcatgtcaagaattcaagctaacacttgagagccaaataataacatgacatgacctttcgtattagaaatatcttgtcgtgatggaaaagatggcagtttttattggtgcgaggtttcaaataagaatcagttggttatgattttgtggtgaaagcaaacgatggttacattgtcaaggcattgactatagtttttctaactttcatcatcagctcgtcaacatgaatatattggtctctaaaatttcaattctttaacattttataatgcttataatattgaaaccttgagaaataaatatatcactaactatttatgtagggcttaaatattcagagaacctttccctcggtatcactaaatttgtcgcaatagtatttcaatttcaattttaaggcaaccatcacatgggatatctgaaattcacggctgacttacaaaggaaaatattccaacactgatgagaagaaagggaaagggtaaaaagtccgaagtatacgtcctcagctggtcacatgagcaatgcaacattttgtttttgactaaatgcaattgcgacgtcattgttcgcccaaaatgaaaaataagaacgttgcaactttagtttccgttttatttttttgcccttttgaattttgataccatatagtgcaacattttcatattcttaatttccatacttgctagctactaaaattataaatcagaagactcattttttttcttcggaaatgtatttcctttttattatatgatcacgttattgactgaatcaaagcaatttgtgtgatgtccttcgcacatcttccacgagaattcctcagttaattaattacacaaaagggtaattttattttaagaatattaattacctatggaagctagcagtacatttcccatcaatataataacatatgttgggatggcttgacaatggaacattttcaaggataatgccgacaaactaagaagatggagccttctattgatcaaatacatgtagcattggattcaagtattaaactaatggacctatgaaaaagcagtgcaatttttttatgtaaaagaagagaaattttatgttacgtttgtcctgttgcatgcataattaaacgcgggtgaccgaactaatccaaaaaggaagacagagaaagagatgagtaaaccctagaagaaaaaaaatggagttgaaaatagctagtgagggaatggagggggtgaggtgtgtaagactttttgtccttttaagaatcacatcagccatacttccctacctataaatcatacccttccttcgccgtagtttcccaacaatcctagctagcaaagttggtatttgcttcaacaaaaaaaacagaaagagaaatctaatcagagagagacaacaacacaagaac

SEQ ID NO: 305 - DNA, 2000 bp, Glycine max
  source 1..2000: mol_type = genomic DNA
taaaaaagaaatggttcaaataccatttactaatataacagaaaccattgtaaaaatacttttatgagagggttttgttgaaaacgtagcttgcaataatgatgagttttgctagttggtagtgtcttcgcggtggaggtggtaccattggaggcaccacgggatgatccattgagtgcggtggtggaagtgccatcgggggtgcataatagagagaagcgacgacgagggttagagaaggtgagatatgtgagagtgtggatcatatatgggtcaatctaccataagccttgtgcacggtggtccaccttagacgtggtctttatctattgcagcaaaaatatctgtatctcgaaaagtttccttaaatccaaagtaaaaaaaattataagtgatactttattattattattatatgaataaaaataccaatatttggtctgagtcattgagtgtgtatgagtgaaggttgaaagccgaaaaaataatggcccagttacagaaagttctagcccgtgtggcccaagtgtattcattgagcatttgagttgcagaagttcctcgaggtcgaggtgcattttccctctctggctcaagtggatacacccgatatacgtggcatcagccttcatgactaacccttcgataaaagacgatatgaatacgtatcttcctgatacttctatataagtcacttttagtcatcataacatatctactagtttattaatcattaatttttattaataaatttaattaatcatctttagttatttttaataacattttctttatttataagatatgaattcaaattaattttacttaaaaagaataaaactcaataccaatccgaccaaccatccagtttagtgataattcatttagaatatcttatattttattttaatattttagaagatagaatagaatttaaaatacttctaatgttgactttggaattttatctaatttgtttatttaatcttttaaaatcacaatattgatagtaaatattcaaaattaattgtcaattatgtcaactgtgttaaaattaatttgttagtagaaacgattgaaacttattatctctctcctccttttctcttaactcctaagctaaccttatataacttcatatggaaaaaatatcttacaagttaatttgtattaaagcaaactcaaatataatacatgcttttttttggttatatgttattggtacgaactatttaatagttttgttgatgattaatcaatataatacatatttatctactagaagaataaaaattcatattttaaaataagaggagaagaaaatataagttaagtatattttaagagagaaaaatgcaatttagttttatttttattatacaaatcagaggacgattttaagttttatatagtttgtttagacttattgtattatatgcactcttaaaacatgtatttgattaggtttataacttataagcatggctaatatataactcttttgtaagttttatttttaatttaattcaataaaatagacgataaattttattaagccaacgcttgattaaacatatgattatatgatttgagtcggaagcaccacgagtctggtataaggtaatgagaacaaagagcacataattggacttccaagttgacatttgttttcgaagacttggccgactccttgaaaaaatgtgtagcaaactagcaatacataattgttttcttagaattattattctatatacaattcgggaagcagactttctatactttatatacaaattgtgaatgcagtgaccaatttaaactttgcaagagggacctataatatagtagtgatggaaacttctgttattcaattatgagtttagtagtgaaaattttgatctataaaggctgttccctcgttgacttaagctaatataaatttcttcaagtgaagaaagagccttattcaagtgtgtgtgaggaaataaaaaaaaaaagaagag

SEQ ID NO: 306 - DNA, 2000 bp, Glycine max
  source 1..2000: mol_type = genomic DNA
gacgtggtcgtgtgcagttccaaaagatacacctactgctacacaatgattttctgacaacataaataatactactatataaataagtccattaatactatcttgaatattcaggtgcgcccttatcacacatgtccgccagttagatgtagatttaattaaattactactataatgcaaagtattttaataaattgcgtgcaccttttcaagtttttcttcctgccttttgtattagtaatgttttacttttggagagtgtcaatgcattgattaaggaataataattaaatattaagccaccgcactatgacgaagaaaaccgggccaattaattccccattttgatccttttgtttaaatagagtcacaaatctgatagctgtaaccatcacttataaataagcctgtttgctgggttatgtttctttctgtgacgatgtctagcgtgccaaagttacaaaagtgtgtaccgagcaacagtttatatgaaccagcagatataattacttaaactttaatggttgaattatttttttaaaaattttctgaatatataacactatggtatttaattagatattacatgtggaaataggaaaacattaagtaacacactaaaaataacaccgttgtggagagtccgtttcccttttggttctattgtagttgaaccctcctaccgttgacgattgttttgttgagcttcgattccaacctcctatttgcatagtagagtggatacaaccgtgacaatggttgatacaagaatcgattatcgtgaaggtggatacaatcgtagtggtagagattatagtgatgtcaattatgatggtgataaagactgtggttacagtcatggtggatcttgtttctctcgtgcaggtgataatggtgatggcagttggagaaactaggatttatgataatgcttaataattaataatggtaggagctgtggtttgagttttcgcatgtctgtcatggtttcgtgttcgtgtggttcttgtttttggaccaatatatttggttgtttgtagtcgattaaatgaaatgataacaagaaattggtgtctaaaaaaagttcgattttgttactgaaatgctttatgtatgtaagttctgtttgggtatttttttcaaattgtgcagtcattgttccctgatagtgtccctggctgacgaaggtgatatccttttttactgggtcgaaaaaaaattacaaagatgaagaaacacgatttgggggaggggggtttaaggaaacacctacgatgagaggattccaggataatgggaacaaaagggataaggactcctcctaaagagttttttttttgtttctcgagaatgctattttaatagggtagtcttttttctttttcccttgtaatattatgtaggtaatttaatcttatactataatgtatcccaaaaataaaataaaaagtttcaatcgttgaatttttaatgttatatttagatggctcatataaatttcgacatggtagcacattttttaaattggggcacgctagccagcgtcttctttgtgtatgacaaactttggatacttttgttttatgaattgtgattagttattatagaagaataatgaagaaattaaatcagtgagtggtgtagtgtgttttatttggccttgcctggatggggcgccaaaattgaagatttagaaagttctccctcagaaatcagaatgagtccacattagaataatatggtaataaattaaattaattcgtacatatcaacgtcctatccatgctttttcatttcagttttgtttctctctgatatacaataaaataagaataattgtactgttgaaaagctaggtctcttgttataaggcacaagcagtccccaccaaagtttttcattagaaaagtgagggttaagaagtttcattcggatcgtgagagagaggttaagaagttttctagctagagttgttgttgttagatagagaaagagagaaa

SEQ ID NO: 307 - DNA, 2000 bp, Glycine max
  source 1..2000: mol_type = genomic DNA
caccatctttggcacatccatagtggatatgatggaatagttatcaggtcgatcatctcgtccattataagcaaaggccaaacacacacacaaaaaaaagataagttaattacattctattgacatttacacaccttgaacaaaaatacttattgtaccattggagtttcttttcaagtatcttaccccacaccgagaaggagatttcttacaaattggactagcgaagaacttggtaagaaaacattttaagaatatctattttgtaaaaagaaaaaaaaaatgcattggcagagttattaattttatggcttgagctgggagacgggtattagaaaaacgggtagtgctcgctcccactggtcagcatactgccaagttctcacggcactcttattatcttgttactcatttgttcaccaaccaaaaatatggtagaaattacccccccgcgctagttttccacataaattcaatgatcggtattgccctgcttcttttgcttctagaaactttgttaatatttcaattttagactaaacgcaatgaaattgatgagaccttataaatatcaacatcatcaggtttttaatttcatttcttggatgaaatttggttggtgagttactgatgaaattatctttgtttctcacattcaattttttagaagaggcgactttcaataaataactagttaaatcaattactatatatttaataattttttataatatgaaaacttatacacaatattttgattataaaatttattaatatatataagaaaaaaactataagaattatgtgtcattttttaattccaaataaatttcgtaaaagatctttcaaaggtcactatgttatccaaattgatctaatggtggtattttaattaaatagtttggataaagttttaggtttaaaatttatttattatatttctttgtctccttgtcactgtaattatggatttgttaaattcttctatttttacaaatcatccttctcaccaatctcactttttcttattcatctgcattaaagcccattaaaaagattatcctttagaagttgatatatatttttctatattcttttttttttaaaatctccggtttgaaaagaagtctaaacatagatttttgaaaggtacatctgcctgttaaggcagcgatatatgcctacattgtgcccttcgcgtgtatttaagactatctttgccctaaagtgatattaaggccggtcaactttgaagttggaaacgtattaacgttacattaatataagggacaaccttcacaggcaaaattcaaagcattgacaaaagctacctcgcaattaaataatgagaaacattgatgactcaaacaaaaggaaaatgtaaaaacttatagtttacattttcatagctagaacataaaaatatagtgctatgtggtataacaaggtttaagagagatgagaaaataacaaataatgcttatgattttgtagagaaaaaaaaaaggtaagcaaataattgcatttataattttgtaaagagaaaaaaaaactgaagagtgtaacaagaagactgctctatgtcagatgcatgtatatatggctgcgcagtgaggcagcaaaggtcacaaggagtggactccaaaaagttgtaagaaaaataaaatttttagcctatagtatatacaacttaaaattgattctagtctaagcaagacaagaagaacaaaccttattctcctattctggcaatactaaatttcaggaattttcgatatatatatatatatacctttcttttctgccacacactatataaaaatagtacaatggatggtctcggaatcatgtttattccctcaaagtttttatattaataattcttattccctctctctctctctcctataattctgacttgggggttgtaattaaagagtggaggttgccccaatcaatcaaaaagctgaaagcagcaacaccaaaaccaaaaaggcaat

SEQ ID NO: 308 - DNA, 2000 bp, Glycine max
  source 1..2000: mol_type = genomic DNA
aatatttaaggattagcgtctccaaaaatattagcaacttgtttatcaataactaaacaaaattttcaattgataaaaaaattcaaaactaacttaaatgtgttgtgaaacatataaccttattattatttgattatttgggaatcgttcgtgaatttaattcgtaggatgtagcacttttcatacggaaacaatgttacttataataactctaaataattgcctaaaaaaagctctaaataattaatatttttataaataaataataaatataaatttatggacatggttttggaaattaaattacatttgctccgtgcgtagcattcaagtttatcaccaactactctacaaaattttgataagactgatttgtttgggtggttgtgaattttatttttaaatataatttttaaaatagaatatgtttaacaaaaacagagaggaaataattttcaaaacatctatagattcattttcacaataaaaataatttgatctattttatagtttttagaaaaatacatattttttacatttaataatgactcttccttctttgccaccaacaatatcattatcgtcattattactataactaatgtcattacaataccattatcaaccagtatcatcatcactatcattattattgttattgctccactactattattgttgcggttgtcaacatccacaccaccatcacaatcgacatcatgaattaagtattgttgttatcattatcaccattcttaaaataattttaataccatataaaactttcaaaataaatttattttgtaactaaaaattgaaagcaaaaaactaaaactaattaaaaactaaaaactagttgctgattttaaattttttgaaactcaactaaaaactaccccaaaatgggcctaggctattcaaatctcaaaacgtttactttaaaagcatatcttcttttaagaaaaactagtcactataaatttttggaacaaaaatgctagtaacacaaggtatgtctcatttgttattcaacaagcctctattagttttataatttttaatcaattttaataattaataaaatgtatgttaaaaaagtatattaaaagtgtgctcacagtcctttttttttgtaaaattgtgtaaaaaagaataaacttaacaggccaataaggtggaccaaacacctattttcaaacaagggagttgatatttccactaccacttttgctattctcacctctactttttgaaaagtagtaaaatatacaaaagtatgccttgcacttgtacaaaggaaacatactttcattgtgtattttttttcaccccctaattacacaacaaaaacacaatttcataatgcaatttttaaggaacagttttgaaatatggataaaatgcacccacatggatagtgccattagcaaaaatagtacaaacagcaatacccttcaaacaaacaacaaacaggcctagaatttgaacccaaattggcttgtacaaactttgtaacagtctcaacctctcatcgtatcttatatttagtatgtttaaatacattttttcctataattttatttttatttttatacttttttaattttaatccttaaaaaatgtgtttgttttattttttatccttaaatttttttatataacactttaaacagaaaaaaaaagtgttttaaacagcaaaaaaacattattaaaagcgttttaaggataaaaaataatattttacaaaaattaaaacgaaaaaaataaaatttaaaaaaacagaaataaataaaaattttaaattataataacaaaaaatatatttaaatctattaattattactagttaaaatgttaaattcgatgttttgtcttttagttgactgggtccctctgccttagatgacaccaacttaataacatcttcatcaccagaaaagcctcaaaagtctcattgttttgttctgtgttcagttaagagtttccgcgtgagagtggcc

SEQ ID NO: 309 - DNA, 2000 bp, Glycine max
  source 1..2000: mol_type = genomic DNA
gcctttctttgaattataataagctactagtatttggagagctatgatgtatcttgatcttttatttttatttttaaagtggtatcttgatcttctataacttggatatatcaataagaatctacttttaaaagaaatagaatattagcaacatattgaaaaaaaattgatgaaaattataaaaattattttttatttaatgaatcccacttgtaattttataatttaaaataaattttatttaatgataaaaaatatattacatagtatatcactaacgttcctcatatatgtactagttagtactttattattgccttattttaacaattaatatattattttaaaatacaaccaaatctccattgttagacaacgtatatatcaaggatgttcaaattatataaaattatatatatatataatagaaaagataagatcaatttgtttttttataacaatgaacattatattgaacttaatgataatttataaatattctttttactctgtaaatgttaaagaacaattttaggtctctaatttatatatcatatcaagaattcaagctaaatgactttggtttttggaggctggtggagaagagaagcaactgagagccaaataaataacatgacatgacctttcttcgtattagaaatatcttgtcgtgatggaaaagatgccagtttttattggtgcatggtttcaaataagaatcagtgggttatgattttgtggtgaaagcaaacgatggtttcattgtcaaggcattagctatagtttttctaactttcatcatcagctcgtcaacaatgtatgtattggtttctgacagaatttcaatcccttgacattttataatgcttatatattgaaaccttaagaaagaaatacaagtaactatttatgtggagcttaaatattcagagaaactttccctcagtatcatgtctcccatttcaagtccgtacaataacccatgatgagccaatttgtcgcaatattaattatttgaatttcaatttaaagtcaaccatcatggaatatctgaaatatttcatggttgagttagagacttataaaggaaaatattccaacattgatatgagaagaaagggaaagagcaaaaagtccgaagcatacgtcctcagctgcgacgtcattattcacccaaaacgaaaaaaagaacgttgcaactttagtttccgttttttttttttttaaccttttgattcttaatttgcatataacattttcattcttaatttgcatactggctagctactaaaattataaattagaaggctcatcttttcttcgtaaatgtatttgcttttttatgataaagttattgactgaatcaaagcaatgtgtgtttccttcgcacatcttccacgataattcctcagttaattaattacacataagggtaattttatttattttaagaaataattaccaataggaagctgcagtacattcccgtcaatataataagatatgttgggatgacttgacaatggaacattttcaaggataatgcggacaaactaagaggatggagccttctattgatcaaatacttgtagcatcgggttcaagcattaaactaatagacctatgaaaaagcagtgcaactttttatgtaaaagaagagaaattttatgttacgtttgtccagttgcatgcataattaaacgcggtgaccgaactaatccaaaaaggaagacagagaaagatgaataaaccctagaagaaaaaaaccgagttgaaaaaaatagctggtgagggaatggagggggtgaggtgtgtaagactttttgtccttttaagaatcacatcagccatacttccctacctataaatcatacccttccttcgtcgtagtttcccaacaatcctagctagcaaagttgatatttgcttcaacaaaaaacagaaagagaaacctaaacagagagagagagagagagagagagagacaacaacacaaaaag

SEQ ID NO: 310 - DNA, 2000 bp, Glycine max
  source 1..2000: mol_type = genomic DNA
gaattttatcccaacatgttaatttgacatattttatcctaacttttatgaaacatacaaattttaagcctttttttatatggtaaaatctgaagtttctttgagagttgagataaaatgagtcaaattcatttattgaagataaaattttctaaaaataaaaaattgaaataaaaaatacaattaagcttttttctctcagttttactttctctttttttttccaactaaataacctttatattaactaaatttcatgacttttagcacttatggtgttttggtttcgattgataaccaagaaaaaaattaatacgaattatattgattcatgatccgaagacaagagtacatattattacccacaaaaaaaagagtacatattattattattattattattattattattattattattaacacataattttaatttgatacgtaaacatgcatgatttaatatccttaatttaaaaataaaaaataaagatttttttataagaaaataataatataataataaagttcttgaattgactgcacgatgagggttgagagtcttgaactatactctactttttttttttctgataagaaaatccaaacccgtgtttccaagttgaggagtatgccgaaaccattgtgtaattactagctagtggacattaggtcaccaaccataacgaaaaatatgcgctgatatataataaaattataattatataataatatttaatgagatttgcctgctagatctgtaattatcaatctaaatttcgtagctgtttcattctctatgataaataataattactctttcgtcgtttcctttttcaacgggtgaaacatgtttgctgcacagaactgaaatttacccctcattagcatgaaagacgactctccttaagaacacttataaaatgtgaacaaaacttaacctcttggtattatataacttggaatccaactcatatattaaagcaaaaagataatttgataatcacattaatttattagctcgtgttttttttttttattgatatagttcgataatctcagggcatatgacatatctattttgttcttccatagggtagctccttatctaggcattttgataagaaaaaagaaccaaacgaggtttgaactttgaacactttaacgttctacgtacctttggtcccaccattacaccgtacatgatgtttacgatcatcatcatcatccattcattcacgacaataatgcataaccccgctatatattttcataaataaattgataagagagaccttaaaaacatatgtgaatggagagtataataagccatattatttatataatgaattcatataatttttttaaaatattatttttattgtcaatcagattatcttatattttctctctctttttataattattttttataaaaaaaattgtacaaacacaaactttctaagtaaaatagattctagacaaagaaagacaatggtaaaaataccagtcttcgtttctaattcttccattatcttacattgtttcaaatttatattttcaaggactcaactcaagtcttcggttctctttttcttcacttcaacgatgcctttaaataaaatattaccaacattttagctgacactttgtagacaagggttcacccgtagtactcttttcatactcattaaaaaattatcatcggagagattttcaatttatattattccaaatattaaactaaatcatgttattaaaaaaaatctacatacataaaaatgaggaaaagaaattgaattaattcctttaccaaaaagtcacaagtttcttttctgtccttcttgctcgaggcaattactccctctttctctctcccctcctcctttatataatcgtaattgttaacatcattctcatcaagttacgataaacattgacttgaaactgatcagatcaattaacacacagagagagagagagagagaagcatagcaaac

SEQ ID NO: 311 - DNA, 2000 bp, Glycine max
  source 1..2000: mol_type = genomic DNA
gcatcaatggtgtagagctattttagaatgacatttcatcacaaatcatcatttgaattacttaagatatttaaaaacttatttactctcattacataactttttttttctctttaaattattataaatatgaaattaatttatgagtgtgattacattccaatagtaagtgctagatttaggacatcactaacaatattttataaggttccaaccaatttcttttttacaccaaatgataattgctagtttttcaattttgttagcaagagagaatgaacctgaatccaccgtttttctctccttctccttcatcttaaccatctaaccaaccttatatctttggattttaaaccaaatattatatacaaatcaagttattatcttatatattatcaatatgtgtagaatgttagattaattaattaattaatctattttatggaataatgttaatgattaaaagacacttaagaaaaatctgacccaatataacgttgagtataagacgacatgaaaaataaaagtgttaggatcatttttttacatgtcattttgcagttttcacattgttgatcaatgaatgagtattagaagacatgatttgttataaactattgtaattttcacccattatattatcaataaagaatttagttgtcattggttatgttggagtatacaatatatacaacctataaaattgaaaatatatttcacctatttttgtagacaatagttcacccattatattattcatgttggcgtatacaaataaaagaaaatacaatcaaaggtgaaaacccaaaaatatataattttgtcttaaattttggtaggataaaatgatttatttttgcatctctttgcttttaatttgatttttatgaaaaataatttaattttcatatgtttatttattttcaatttagttatattattgtatgtcattgttataatactttttttagaatttaaaattttcaaaatataaaaaataaattaatagtcattttaaataaaatatgatattttttatttctatatttgacaattattttttattcaattttcatcatcataagtaattgttattattataagcaaatgtcatttattatcactatactgatcatttatatgtagtgtgacatttaattaaaaaattagagtatttttaggaactaaaatgatattacataattaaattcaatgacgaaaatgtcaataagtgattaagttcaaaattaaaataataataaattgttaagtttataaatcaaataaaaaaaactaattttttacacatgacagtgatgatacgtgataatttatcatattttttgcaactttaagaataaaattttaatttttttatctttggatctaactcttcacgctaataaattaaagaataaaattaagtatttactcttaataaaatacatattcttttatgaaaaactactcctataattttttttaacaaaaatgctagtaatactttttcaattgtttattaaaatttattaaaaatataaacttttgtatgtcttactttgctgtttaacgagtctctcttttataattttcggtcaattttaatcattaataaaatgtacgttaaaaaaaagtatattaaagaatgtgttcactgtcttatttttgtttttgtaaaattgtgtaaaaaagaataaacttgacaggccaagaaggtggaccaaacccattttcaaaccaacaacaaacaggcctagaattagaaccgaaattggcttgtacaaacttgtaagttgaacagtctcaacgtctcatcttatcttattaattagtattagttaaaatgttgtagtaaatgcaatgttctgtcttgtagttcactgggtccctctgcctcagatgacaccaactttataacatcttcatcaccagaaaaagcatcaaagtctcattttttttgttctgggttctgttaagaggttttctgcgtgagagtggcc

SEQ ID NO: 312 - DNA, 2000 bp, Glycine max
  source 1..2000: mol_type = genomic DNA
agtgggtgaaaaaaattaaaaccactttaattttttaatttcaaaactaacagtaacctctcatttttattactattcataacatatctatattttcattctctttcttaagaacaaaacactgaccattccctcctctccctttcccttttcttaaaccaaactaaataaaaggaattctcctttcattttttttttcattccctcctttcatttaaatgcattttaagaatatctcatttgtaaaaagaaaaaaaaatgcattggcagggttattttatggcttgagctgggagacaggtattagaaaaaggggtagtgctcgctcccactagtcagcctactgcctcggttctcacggcactcttattatcttgttagtaatttgttcaccaaccaaaaatggtagagagagagagagaaagaaagaaagaaaaaaaaacccgctagttttccacatagattcaatgatcggtattgccctgcttcttttgcttctagaaactttgttaacatttcaattttagactaaacggaacgaaattgattagaccttataaatatcaacatcatctggtttttaatttcgtttcttggatgaagtttggttggtgagttactgaccccatataacgaaattatctttgtctctcacgttcaaatttgtagaagaggcgactttcaataaataactcaatcaattacttttccaatattttataatatgaaaacgttacataattttgataataaaatttgtatatatatatatatatatatatatgaaaaaattataagaatcacgcgtccttttttaaatctaaataaatttcataaaagatctttcaaaggccactatattatccaaattggtctaatggtggtattttaaatagttcagataaggttttaagtttaaaaaaatgttgaaaaaaagccaccgtatttctttgtcttccttctcactgtaattatggatatcttaataaattcttctatttttacacagcatccttctcaccactctcacttttctaattcatctgcattaaagcctattaaaaagattatcctttagaagctaatatatattttctatattttatttaaatctggtttgaaaagaagtctaaacatagatttttgaaaggtacatctgcctgttaaggcagcgatgcctacattgtgcccttcgcgtgtatttcagactatctttgccctaaagtgatcataaggccggtcaacttagaagttggaaacatattaacattacattaatataagacaaccttcacaggcaaaattcaaaccattgacaaaaggtacatcacaatttaattaataatgtgaaacatggatgacccataaacaaaaagaaaatgcaaaaacttatataccacatttccatagcttttttcctgctagaacataaaaatagttccatgtggtataacaaggtttaagagatgagaaaataacaaataatgcttataaagagaaaaaagaggtatgcaaataattgcacttataattttgtaaaaataaaaataaagaaagagtgcaacaagaaactgctccatgtcagatgcatgtatatatggctggacagtgaggcaacaaaggtcacaaggagtggactccaaaaagttgtaagaaaaattaaaaatgttagcccatagtatatacaacataaaattgattccagtctaagaaagacaagaagaacaaaccttattctcctattctggcaatactaaatttcaggaattttctatacaaataaataaatatatacctttcttttctgccacacacactataaaaatagtacaatggatagtctcggaatcatgtttatcccctcagtttttatattaataattctcattccctctctctctctctcctataattctgacttggggttgtaattaaagagtggaggttaccccaatcaatcaaaaagctcaaagaagcaacaccaaaaccaaaagggcaac

SEQ ID NO: 313 - DNA, 2000 bp, Glycine max
  source 1..2000: mol_type = genomic DNA
ttttatttattaaattcattcacatgacaagaagtttaattttctttaaaaattcaatttaaataaaatgaataagttttggaaaaatttttgctggttcttttaacttaatttaaattagttagaatttaaaatgacttttattagcaaagttctaatataatgcgcaattaataatttttagattagaagtaagttttaagataaaaaattataatattatcaaataattttaactaatttttatttatcttttaagatgtaataaaaaaaatacattttaagatataaaaaaagcccaaatactatctacgactttctttcttttcacaggttttgaatcctaaaagttaaaacacttcaaaagataaatttaaaataaattataacaatttcaataaattaattttggtttatgcataaacaaatgctcgatcggtccaaactccaaagaatatcaatgatatataacctccacatgtttatatataaaataacaatttaattaacaaataaaacatatttggctttatttatttttttaattatgttatagcatctttttataagtacaaaaaaacatggaacttttatgtagatttttagattaagtggatcttatgaaatattaagataagtttaatccatggatgttcatgtaaacaaaagtaactagtttaagaaattgtggaatccctaagctatacttcaaatttatcattctaattagatgattatttataagagaataggacaaaaagttatcatgtttatttattacagtattttataacgcggggatggtcacaagtttgtcttgtatataagactatattttatttaaattcagttttcatccgtaatctttggatatagtcgtaatatattataatttttaaggccaactttttcaaaacaatatttaattatcaatcataaacataaatttaatagaattatgaagtgatcataatagacatctctatatatcatatataatcacattgacacttgttgaggatttgttaattttctcttgaatacttctaaacttttaatccctacactaacttattttaattgttcaaaaaatcttacactattattctttatatattacattaattttcttaattgtttaaaatctcaagagatgtcaggggttatatgcaatctcaagtataatttatcctatcaaatatttcattaatgtactttttttttttttatcacatatcacctattatatttatacatattctatgtgttaaatagagtttggtgtttatcagaacttttccgaatgtctgatataagaaaggatatttgtcatcttggttttttgaattggtaggttgcattatatgattctataataaatgttaaattaatttccaagaagaaatattgaaagaatagcgatactagtaatataatatcataccgtaaaattcccatttttaagaatttacatcatccattcacctcctcgcagtagatgaatagataatgatgaccccaaattacattaatgaagaacaattaaaaaaggatcgagtctaaagagctatcagcagtgcaagaagcagcatataattgaaccttcaacttgacaatagtttactcatgacttggcccattgcttgaaaatgtgtatcactagaccatcgttttcaaggaaaaaaaaatcatacacgttataacttagagcagactttggatacttaaaattgtgaccaagttaagctccttctcttaaaaggttcctttgtatatggtgatagaaccttctataggctaatcaatgatataatttaggaaactgacaagacaattgaagttacagaggctgttccctttgacttgtgccatttcttctctgaataaacttctattgatgccccgctccacgttccattcttcagtattcttgtagtttgtaccttcctcagactcccacttcagaaaccaagtagagagagggagattaacagaaagtg

SEQ ID NO: 314 - DNA, 2000 bp, Oryza sativa
  source 1..2000: mol_type = genomic DNA
tttttttttggtttagatgcacattttatctcggtttatgttagcacgttttctaaactgttaaacacacaatatgtttctataaaaaccttttatatagaagttgctcataaactatttttcaagtttataataatcacaactcaattaaccatacactaattactttcgcatcctacgtgcatttacttaatccttattttttttatcacttccgaacggaacagagtgtgacacggcatatatgtactttcccttcgtccttttgatgccctaattaatcgaatgcgaccagtcgatggatggatcgatcggccatcacgtcgacaaatcccttgtcacacgggcacacgcaatcaaggaaagaaagaaagaaagaaagcagccatgtttgttaatgttcttgttaaccagtagctgggtttggccaacgatccccaacaaacatagcttgatagctccagtccgtggccaaccccccaacagattacactttctctggatcactcgtcatcgcagattagtaggagattcttcggtttgtccatattgactaataaaccaaaatatcttattaaggaataaaaaatatatagttgaacttttatatatttgttcgtactgacttaaaagttaacgctaaaaaaaattatgttaaaatatcttgaaattaactttaaaattaaatttaaaaatttaaattttagcttttgctttaacttattaggccaaccgataccacagtggactccaccttgatacgcagccagcttacaggtggggcccactttctgggcgggcaattggtccacagtgaaccggtctattcatcactggagtatagtagtcccgtggaccgcccaaaagttcaggcttttgtgggttgacttcaatttataggtgagtattgcgagtttgtgacagattttccgtggaacaggaagcaaacacgcatgaattttgtgagattttcagatgagaacaggtagctctccgtgaaagttcaggttaggattctcctgctcctgaaaattcagaagctgcacaatttgtgttcagtttaccaatgatcaatgtatctagacttctggactctggagtatcacataggtaagcgattcgatcaacttccaaaaaaataagaattttcttctgttaaagaaaagaacatcaggtgtatcctgatgataaagaaaagaacatcaggtgtatcttggttaatcgatgatctttgtttaactcggtgattaatttgccggccggttgacttatgtaacattgtaatttgtaacgtacatatgaagctcttaatttgacattacaagtgtggtcgttgaagtagatttgcttaggtcgaactatatatttgtacttgtagatctccagtggattattggatttcctatagagacaagaaattgcaatgtgcatgcgtgtgcctggcaaattaatcaaccatgcaaatatcatccaatcaaatcactcaggttgtgtgcaaaagcatatccaaagccaacttgaaaaaaaaattactcgttcatcggtgtcaccttccatattctttcaattaatcacaacctgaacatatccagtagaatctgaaaatctcatttgaatttctcattaagctgtggtttttcttccccaagatcaatctagctgtactcaaatgctttataaaatatgaattaattaattatcaaattgggtattgttgacttctcattccccagattctgtggtgtgctgaaaaacaggaaagagcagcattggtagttatgcaaccctctccaaccccaactgttctttggatcactttgtccttccttgacatctttttttcctattgacactgatcactgacctacaacccctatataaacacttccccctcaaccccatatcctcaaacacacaaaaccccaactttctctctctacaatccatcaaccaatttctctcctcctcttcctctctcatcactccaaagatcatcaacc

SEQ ID NO: 315 - DNA, 2000 bp, Oryza sativa
  source 1..2000: mol_type = genomic DNA
gacataggttgctattattttcactgtaggtactcattttaagatggacctcatggataggaaatcagaggtgaaacacattattgaggaagtaataaatagtatgtctgatgatgaggaaggtgaggaagacaatgctgaagatgacaaagacaaaaatgctaaggaggaaaattcaaaggaagatgctgatggtgacgagaagtaattcagcggaccacatgtgatggtcgcttgtgttagtgttatggatgcaggactttctagcccaacattgccgtttgggctgtgttgggtctgtacaatgagggcaccgcaacaatgaactggtgacctgggggtagtacaaggttgttaacaatttgatagccacacacacctagttgttgtgcttgactttggtgtgacttgtagtctagttgctggtcatgtacaatagctgtgctgttataactttgcttaggtagctagcctgactgtaatatgcagaataattctttgcctgttccttccatttatccatgtaaaacagtgaatttggaatttttggttcttgtgtcaactctcatctgcccaccttgccaggatgttcaggaggatttgttgaggaaatgatatcggtcatttcaggaaccaacatgggctctggagcaaaggggcatctgtatcgaggtgctgtgctgcagtttatggttccgaattaataagtgccatctgtgagtatgagctgattttatgtggtaaaatctcttaattgcaatgtgatccagtgattaatatggaatgccatatgttattgttgatggtgaagtaaaatctgctcctttccctgatgatccatgaaacatttcttgtctgattaaactggaatttttgctgtccttgaatctagaataccatgttaggtgatctaatccatccagttcgctaaagatctactttcctcgtcttagaatgtataatcgtttttgaggtgggcagggtattaaggaaatatgtgagaatgatttgatgaagtttatgatttgttgaggagagacaataagtgaaaaaaaattaaatggataatggtagtgattggttgaggcttgagagtagatgtatgtgaaaaatagttccattttaagataaatgattgtgttaaaaataactatattttcatatagaggtcgtagtattccattcaatttgctgtaaagtactccctccgtattttaatgtatgacgccgttgactttttgaccaacgtttgacctttcgtcttattcaaaaattttatacaaatataaaaatacttatgttatgcttaaagaacatttgatgataaatcaaatctcaataaaataaattataattacataatttttttaagcatgacataagtattttataattaaataaatcataagtattacataattataattaaataaattataatttattttattgagatttgatttatcatcaaatgttctttaagcatgacataagtatttttatatttgtataaaatttttgaataagacgagtggtcaaacgttggttaaaaagtcaacggtgtcatacattaaaatacggagggagtatatttatacttgcaagatccctggacaaaaacacagcagcatccctgtcctgcgttcttgtcatatctgttatttgctacaaatatttatccggaggaatacgatacaacattgcattggacgagctcctcttgattcctacctactcggagaaacaaaagcaacgtgcacgcagatagcgtttctgctcaggatcaatggctatgcagctcactccatccaaatgtcccaaccaaccctagctttgcttgcacacacgccggagagaggagacgaccaaatcgacaatggtaggcttgaaatgaaacctcatcaccctccccttctcttcctcttcttatacattcatctggtgccaagatcacacacactcaccggtgttcgtcgctgatccgatcgatcaatccaaca

SEQ ID NO: 316 - DNA, 2000 bp, Oryza sativa; identical to SEQ ID NO: 314
  source 1..2000: mol_type = genomic DNA

SEQ ID NO: 317 - DNA, 2000 bp, Oryza sativa
  source 1..2000: mol_type = genomic DNA
tcaaatatttaggggcggagggagtactatcctctattatgaccgtgatgatattgtaaatcattttttttcgaaatcggaaaccccagatacagaaatggaatcggatattattaaaaccgaaaacatagcgaaagtgaactgctgcggatacggtaacgaaaatttattggaataaaaaaaaccctcaaactgaacttcaaactttatcaagtccaattctcaaatcccaaaagtcaacaattcatcataaaacacaatcatatcagtctcaacagtatatgacaaaacataatctatgaaataaatgatctatgtttaagataggaatcatattgataaatcctaatacagaaatttaggtcaggctattattgtgttgtatgggctatgctatgggtctggaaattccgagaaaatttccagaagtttccaatcgatttcgagttccgacgaaaccgctcttatcattcgattctgtttcggagaaaatattttcaaattcaattccgtttctgaaaaaatccgaccgatatattccgttttcgaaaatagctttatgatctgaaaagttttcataccgtttttacccctaacgactaatgtcagatgtgacaaatttagttacaaacaaaatagaccctaattaagtctctttgataatgtatccaaaagtgcttatacttagacaaaggtgagttttttttaaaggagggcaaaagctttgcctcgtatattaatagagatagagaaaaaacaaaacaaaatcagatagggaaatatttacagggcaagccaaaagatagacaaaggtgagttaactttcgatatccacaaagtcataacttcttaggctctatttctttcagcttgggattattataatccagattattgggagtaagctgaaagaaacagataacttattgaagtagcttattataatttggagcccaacttattataatttgataagctcatttaggtgagttttttctagattattgggtgaaaaattacccaccatgccacccccactctctatttagacttgcaaactcaataatctaggctctaataatctaggaaagaaacagctaaccgtttattctactacaaattataacaatctagcttatagtaatatgactcaataatttagattataataattccaaactaaaagaaacagggcctgaatcgtctaccgttgaaaaaaccagcgtaaagaacttcataacatcaagtacaactagctaggacgacggaaccggagcaaattaagctgctgcgttacactattgaccggctatattagtctatcacgaccgtccacatcgccactcaacaacaccatcgctgccgcgcgcggcacaaaggtggccgtcgccgactcgccggtgtgtgcggtgttggtgagcgttcggtgagaacgttctcggcttccctcccccctcacgcacgcgcaatccacagctagctagcgcgggcggcgcgcgcgtccaccacgaaacccccccgcacgtagccatcggtgtattactactacaaccggttcacatcacacctcgcccggttatttccaacgcgaggcataaatacgggagagggaaggggaaacccgacgcgacacgtctcctcgattccgctggttttttaagtttggtgaaactcgatcgcttaggttaaacctcggtagctgttgggtgcgaggttggccatcgatcatctctcgctggatcacgccactttttcgcatgcaaagcgtaggatttctctctttgtttttaggatttcttggtggttgcgagccgcttacctgaacccagaaccccccagttgccggtcaagccaaaccctgcccactgcgatcgcctcccatataacacatactctcttcctctttctcttcgcttcatcaagtagtagtcgtgttcattaatctgcatctctcgcttcacgtactttgaagtggtggtgaactgtgttttgtgtcatcg

SEQ ID NO: 318 - DNA, 2000 bp, Oryza sativa
  source 1..2000: mol_type = genomic DNA
gtcaaatatttaggggcggagggagtactatcctctattatgaccgtgatgatattgtaaatcattttttttcgaaatcggaaaccccagatacagaaatggaatcggatattattaaaaccgaaaacatagcgaaagtgaactgctgcggatacggtaacgaaaatttattggaataaaaaaaaccctcaaactgaacttcaaactttatcaagtccaattctcaaatcccaaaagtcaacaattcatcataaaacacaatcatatcagtctcaacagtatatgacaaaacataatctatgaaataaatgatctatgtttaagataggaatcatattgataaatcctaatacagaaatttaggtcaggctattattgtgttgtatgggctatgctatgggtctggaaattccgagaaaatttccagaagtttccaatcgatttcgagttccgacgaaaccgctcttatcattcgattctgtttcggagaaaatattttcaaattcaattccgtttctgaaaaaatccgaccgatatattccgttttcgaaaatagctttatgatctgaaaagttttcataccgtttttacccctaacgactaatgtcagatgtgacaaatttagttacaaacaaaatagaccctaattaagtctctttgataatgtatccaaaagtgcttatacttagacaaaggtgagttttttttaaaggagggcaaaagctttgcctcgtatattaatagagatagagaaaaaacaaaacaaaatcagatagggaaatatttacagggcaagccaaaagatagacaaaggtgagttaactttcgatatccacaaagtcataacttcttaggctctatttctttcagcttgggattattataatccagattattgggagtaagctgaaagaaacagataacttattgaagtagcttattataatttggagcccaacttattataatttgataagctcatttaggtgagttttttctagattattgggtgaaaaattacccaccatgccacccccactctctatttagacttgcaaactcaataatctaggctctaataatctaggaaagaaacagctaaccgtttattctactacaaattataacaatctagcttatagtaatatgactcaataatttagattataataattccaaactaaaagaaacagggcctgaatcgtctaccgttgaaaaaaccagcgtaaagaacttcataacatcaagtacaactagctaggacgacggaaccggagcaaattaagctgctgcgttacactattgaccggctatattagtctatcacgaccgtccacatcgccactcaacaacaccatcgctgccgcgcgcggcacaaaggtggccgtcgccgactcgccggtgtgtgcggtgttggtgagcgttcggtgagaacgttctcggcttccctcccccctcacgcacgcgcaatccacagctagctagcgcgggcggcgcgcgcgtccaccacgaaaccccccgcacgtagccatcggtgtattactactacaaccggttcacatcacacctcgcccggttatttccaacgcgaggcataaatacgggagagggaaggggaaacccgacgcgacacgtctcctcgattccgctggttttttaagtttggtgaaactcgatcgcttaggttaaacctcggtagctgttgggtgcgaggttggccatcgatcatctctcgctggatcacgccactttttcgcatgcaaagcgtaggatttctctctttgtttttaggatttcttggtggttgcgagccgcttacctgaacccagaaccccccagttgccggtcaagccaaaccctgcccactgcgatcgcctcccatataacacatactctcttcctctttctcttcgcttcatcaagtagtagtcgtgttcattaatctgcatctctcgcttcacgtactttgaagtggtggtgaactgtgttttgtgtcatcg

SEQ ID NO: 319 - DNA, 2000 bp, Oryza sativa
  source 1..2000: mol_type = genomic DNA
gtctcgccggccggcggagataacgacggcttggagaggcgcagcctcctccacttccgccccctcgggcctattgccggcagccgctgggaaagaagcagcacacgagcgtcagccggagggaggagaggagcggtgcgcaggcgcgggcgtgggcgccggccggagggaggagaggaccggcgcgtgcactcggccggcggaaggagaggagacgcgggcggaggccgaggggagcgggagaaatccgcgacgcgctccgcgtccacatgctctctcacggcgccccacgcccccaccgattcaccacctacctcgtcacgtgcgtcaaccaccgcctcctccactcgccaccaacgccttctcatcctcgagggcgatggcggggtcgagaggctcctcgacctcctcgacgcggctgacgccgccgtcgatgcgcgggcagcgcttgagcgcgaggatggcgcggtcgtcgaggccgtagagatggacacggagcgcggcggtggtgcggcggaggcggggcgtgaggaaggaggagaggcggaggtgcgcggcggagacggggcgcgaggaaggagaggcgacggtgcgcggcggcgtcggggaggcggagcttgatctcgacctccatcacggggggcagggaggagaggggaggctagggtttggggttgcaattgggattggtagggaggccgatgcggtgggacttggagggcgcggcgccgggcggtgggtggaggaggaggttggagttggagggcggcggggtcgtggtcggagtggatgaggcggtgggggtgctggccgccgccgcggtggcggtggcaacgcagaggtggtcttcgagctcgtcacgatcgaaggtggtcttcgcgcgccgccgctccagccgccgtctccccacttcgcccgctgccccagtgcacatcgtgaaaaagagagagaggataacgggaagaagatgagggatgggaggatgacatgtggggcccacgtgggtcccaccattttttttattattattttgtatgtgaaacagacatgtgggtcccacagggtttattattttttcggatcaaattgccacgtaagtgccatgtcatatgaagaccgagtcgaatttgccacgtaggcgccacgtcagccaaaaccgccatctaaaccgccgagggaccttatctgcaccggttttaatagttgagggacctgttgtatctggttttccggttgaaggatgaaaatcggattcgttgacaagttaagggacctcagacgaacttattcctatccgaaatttctctctttgttgtatgttactagtaggttggatgaatattggtaagagaggagacccatatttctcacctactactttcgctggccggttatacgaaacaacattggtgcgctgcctgcgctgcttctagggaaacacttgacgaaaatgattggtaaaagtatgggcaaccttctccctagtttgcaccaacagcaagacgaaaggaaaaacagagacttatatcaagatgatacacgcactgaattttctgcgccgaaaccagtccgcgatagtccaataccgaggacgctcctcgctttctgttgcaatgtttgccaaaaaaaaaaaaagagaagagagcaccaaacacaatttgtttatctactggagtgaacaacagaacaacgtcgctaaatttcttgttaggaagaatggccaagaaggcaagaagtatgaacaagagcaatgaattttatttccccttgttgaattcaaaaacttgagagacttaaacttgggccgacaagggaagcaacgccacacggctcgtgtgaagtgcacatatatatacacgatggcgccaaacacatttctcaactcaccaggcgcaccgcaccatttctaaatcacatagtgctaaacccgccccctcttaattatatctccacttagcaaggtgtgtggttgcgagcttaaaacgcacccacgcagggcc

SEQ ID NO: 320 - DNA, 2000 bp, Oryza sativa; identical to SEQ ID NO: 319
  source 1..2000: mol_type = genomic DNA

SEQ ID NO: 321 - DNA, 2000 bp, Oryza sativa
  source 1..2000: mol_type = genomic DNA
cagcggtcgcctttggttcgtgtgggacatttcggcacgaggatcatgttttcactttcacgggcaggaatcaatcaatacgaagcttcctgccgaggggaaaaaaacgagaggattgtgtaagtgcccgagagctgtatacgttatactccttttctacatggaagataatacaatatattcacacacccgtgaataaagtttattttacctatacgtacgttcaacaagctcactgaaatttataagcttcactaaatttatattataacatacttggtaattgtagtaggtatcaagatataaaccccaaaatcttttatccctagctaaactattcaataggccaatcctagaacttcatagggccacaggagcattatttttctttcactatttttctagagattttggaaaactacagcttattatatgtcacaaaacaattatcattatgcgataacattaataactaacatttgctactcatcacgtgaccctacctactctagccattagattgagaccagtgaaagagagtctccttccacctctagccagctaagagataattgatgtggcacaacagcgtacggaagtacttatcaattatggattcatacaatggtgtgatagtggatcattggtgctttacatacacctaaaataaggatattttacaatttcattagtactacaataaatgatgctaaatgggttactaatgcaacaagtggtggtttatcgtctcaccatttcggttggttaacttatactagggtattacaatatctttagaatagaggaatttgtagagcttccacgtgaaattatcacactccaaaggagtcctaagtagctttaattatattaaatcagtccttgctaaaccttggttttcaagtagattagacctgcaacctatttcctaaccctgtaaaggggcagcttaaagacaacaaccgagagataaaaatataggtatgctaactgagcaatataaggaaaaataaaaatatcatatgaactgtgaataaatctagttattcgtctacttgggaccaatagtttagattaagattaagtttgtgattgtaatgttgtgctacactgtccttatcttttatgttgatttggaaataagaaagttataacttgtaatttcttcacatttcaaattatttttagatagtctattttagttgttttatatttttataaacattatattttcataccaaattaacatcgaaatatccaaaagcttcttcaccaaatatgatgatcataatccactaaatttcaatcagagcccaaaataggagtccatgtcacgtacataataataataattaatttgtttccaaacttattaaactaaaatttaatataaattaagacttattatgagtgcaattcgataattactaatttgtatatcagaattattaaaattatgataataacatacttaagactccaaattcagaaaaaaatataattatttctaaaattatgacattatttagaaaaactcaaattatgagtccacatgacaagtgcaacttctagataattgaaataataaattaggaaaagaatatgttttaggctacattcgacataattttttttgtttcatttactaattttgaatttagagctattaaccaataaattgttttattctttttcttagctgataaattgttttagtctgagtgacgactgcaccgttaccagcttgcataataaaggctaaagcggacgagatgtcaaaactaaccataaaacaggggttcatatcccgggccctctacgtacattttcttaacagtgaaacgttcgatataaaaacggtgtgcgctgagaacggcacaactctgtttcacacacacgcacacaccccctcagggagggatcaggccggcgcacgcgcgcgcgcaaaaaaaaaaaaaaaaaggatcgagagagaaaatccgtgttgtttgttcttcgtc

SEQ ID NO: 322 - DNA, 2000 bp, Oryza sativa
  source 1..2000: mol_type = genomic DNA
tttagcaattcattcgtttataccctcaaatagctatcacataaattatataattcatcaatttcatctatcctaaaccttactacattttttttcatgcaagtcatggtgattagtaaattggtgatcaacggatcatcgaagtcgtaaattgaatatgtaagagttactctgaacaattgtaaatatgtgtcaaaattaatttctattaattagacatctaatggcttgctagccacaaaattaatttctctatacatgtatataaacatggacgaagctaaatactaccatatgtcccatacatatatattgcgcagttaatattctaattagtcatttaaaattccttaaaatgctctcaagctaccacgtggtgctctaataaattagggcaaatattagaaattataagaaaaaaaatcaaagtatctattacttactttccacttaaatcggtaggtccaatattataaaccgttagattaaattgatcttagaataaactaaatactacagggtcccacctcagcataggtgcgtacctacgtgcgcgggttcgtacgcctcccatcccttttttcatttttctctttcttccttttttcccatgcatatgcttaactccctttattactatatcatgcgtattcatgagacgatttaatcaaagattttgagtatcttgcactcgcattttttatttgcggccatactacatgatatgtatatagatggaatgcatgataattaactaccaatagtttcttatttactcgagaaaaaaaaacatgattcaaaagttgtaaatacttaatccatctcctactcaaaagttcgtgaatggttttctaagataccttaagaaaaatagaacccttaaattattataaaataacattatccaaactttagtttgtcctaaatctatgagacaaaatttctgaacaaacaataattttatatttcaataatataagtgtctgcgtatacgcgcgggccaccttcctagtttaaataaagaacttagcccctcagataaagatttaaactcaggaccttaagttgctactcagcttactacaaccactagagtatatgcctttgggtaaactgctactgcaaagatgcaggaggagtagatgggttgagatagaagtgtgtataataagcgaaaagagcaaacgggatatatgatgaaaccacgtcggccagtttgatcgtccatcaattggtggcaaaaaatgtgcctgcctgcaaacgctgcaactacgcctgcatgcttgtcggggtaaacgcaaggtgttcttcttcacgccggctgcaactacacctcttgcattcttgttactacaaactgttcacagaccaatacaggtataggagtagtatacaagaagtagaactagatactcctactccactgatgtaaacaaaaccatactccactccattgcctgtcattagcactagtagattctcataacactagcagttcagtagtaccattgcctgtcagcgaaaatattggagtactcgcagtactccaattgagagaatagagtactggagtactttgtcgcgtccttgcgtctgtactagtactgtttgtagtactctgaacaagaaaaacggaagcctgcacagctgcagcctgcaggcgagaatcaaagatcgaaacgggaaacaaacgccactctgcactgcagcctctgctgctgaagctgaaccctctcggtcactgcacctcggcctccttttccacacttttcaccgtgttcctcctctctctttctcccacccagcgcgcgatttccccctttttttttttttttttttataagaccttgcagacgacgagacgaggacacagcaagaggacaggacacggcgcgggtacaatacaatacaagtagcctccacttcttgcttgcgtcttcttgtccctcccttgtcatccagaggagatcgaggaggtgttgtgttggtgtgtgtggagg

SEQ ID NO: 323 - DNA, 2000 bp, Oryza sativa
  source 1..2000: mol_type = genomic DNA
aatttttccatcacattaaaacttttctacacacataaacttctaactttttcatcacatcgttcaaatttcaaccaaacttacaattttgacatgaactatagactatacacactcataggttcctaaaaaaattagactacaaaaggtaaaatatgttgaaatgaacggcatatttccaaatgtatgctccattcagaacacttgaactggaaaaggtcattttgtaaaggtaagtgaaatcgtctccttcttatagatggccccagcttaattactaaacgaattgtgaataaaatgatcgtccttgttccgttaaaagtctagttcgcattgcaacgcggagttactaaacgatgcaggagaaacaaattgtgaataaaatgatcgtccttgttcctttaaaagtccagttcgcattgcaacgtgcagttactaaacaatgcaggagaaacaatgtgccagtcttattaatttttctaaggcagatcagatgtcatacaacgagacatgtgaatctgttgcgctgtggttcatttaaaaatctctcggtggtgggtgttcttcaaagtccaatcctttgaaagctgtcggaacatcacactggtcaaaatgtacagaacagcaaagcacgaacagcaagcagcgcggctatcttcccaccaacatgctctcttgttgcgcgactgatattaaacacaattaaaaacgggacatgattccaggggcagagccaaggtcaagcgtgacgatccatacggttgtggtgtcaaacgacggattcggtgcaaccgcaaagcagagactgtaccgggtgcacacaaacttgtgagttagaacgcttgaccttctcgtgtggtaaaatgcttataattctcgcgttctctgataaaacaattgtgtatagccatgccccttccctagcccttttctctagtctagaccgtactggaatgccttatctgcgtgggcgcgagtttgacaagcgttatgtgtttgtcaaccgagtagaaaccgacacgtttcgcgactggattcgatcagggagacggtaaagctaacatagcagagttttagaatggctttgtctgaatctctagagaatggaggaggatatctgaaactcgaactctacccttccagtttcagtgcagagctaacatggatcatttggctctgcttaagtccaaagttgcaaaataatttcgcagtatttacacatgcgcggtactcccgtcgacctatccgcggagaagatcgaaacgcatttggcaagaacagtagtgatttcgtgaatgcgccacactgcctcgtttttttagtgcaaggaggtgacgctcctctccaattctccggccgcgtgccggtggtggaaagcaaaatactactagtatagtatatactcgtagtcgtaccgtcgtatactacaaaagtagtagtacaagaagacggaagaattgaattgtgtgtgttgaccgtacccgaaaagtaaaacacaagcgagcgagacgacgtctcgcgtctctcctctagtcaacagcgaggctctacactaccatgaaaaaaaccaatacttttttcgtaaggacaccgcaccccgcggctcggccggtcgagtcgactcggagacgagatcgcgtagctggtatcacctgcgctgccccaccagtgccggctaccgccagagagaaagagagagagatggctgtctatgatgagagcgagtgcgcgcgcccgctataaagcccgccccccggtgcagcatagtctgagccctcagcctgcccagctgccacgctgcatcgcacgcacgccgctccaagcagatacgcgcctgcaggccgcagctgcagcagcagccacgcgacacgctcctccactcctctcccgtgcgtcgtggcagggagagagagccggagggagagtgagtgagagaacggtcagctcgctctaccccgcgcgcccacgtcgcgtgcttggattggtacgaggccggcggg

SEQ ID NO: 324 - DNA, 2000 bp, Oryza sativa
  source 1..2000: mol_type = genomic DNA
attgcatattggtcatgcgccgcaacagctagcagcatcctgtattcctgtacgatgaagcagcttggaagttcgatgttaggcaagagactacaagaagacagctaattaatgatcaaccaaaatgttttagatatacagcaaatgcatcagaaatctcagacagtgtatacaataatgtgcgcgtgagaaaggtcaggaatcgcagggcatataattggatccatatatacatgcactacaatcgcttgcgtgcgtgcatacagcattcacatatgtatgtactatattctcgtatctatctactaaactaaaaattcagatatggttagtgtgcatgagcatatacaaactacacaagcaacatgcatggttattgattaactctatgtttatgtgtgtggatgaaacacattgcatcaaccaattggagaaggaaccgtaagaatcttaatcagaacattctactcttgcagctacggatcacttcaaggaagaacacagcagcagaaaatgttttaacatgcaccacatgttttactagtagatcaatatcgattgatgaaattaacgggaccagaccggagtcagtccccattttacctgacgaacttctccaactacgttagatatacgtagagctagcatatagatgacgataatcacgtaggtcatcagatgctactgttttcgtttcacagagaccagatcaacagagattaattaatccttccaattgtttacagtagtcatttggcttgcgacattaccaatatacgtgcttaatgtccgtatcaagtgcacatatgcattatttctgctcatcgtagaccgaagttacgacgatggacactaccgaaaaggcactgactgcaagcaagcgtcacttatcttgctatcttgctggctttacttgtagcggagagtggaaagaccagttcagattcagtagttttactgaacctgaacctgaccatttctaccacatttctgcatttcatttcagaaaaaaaaagtagtaatagtcttaaaatcttaatacaagcggaaaacggaaaagaaaaacaaatactatttttcagcttttcttttttgtttcctgaataattcgacaacagtttggaagtctaatacgcatgcagctaattcagcatctgtttagttatccccagaagaaaagatcatgtggccgagaagaacatcagactggatcactggaactagcgttcttgtgttggaagtcaaaattaccattcaagaaaaaaaatataaaactggttataaaaattggttgcaacgtccaatggattatatgctcatctagataggagcatatacgtacgacgaactgcggtagttgccaagttataatcaagttaggtcctcctaggcctgtagaatatatgatcgctgatcagagggcacaagcaagcgcccgcccatggacattatttctgtcgcttgaccaaagcatttttctatgccgcacatacaccttccctacaagaaaaaaccgtcgagtcgatcttgaaattaaatcctgcaaactcaaataaataactagtcggcgacagggacggactaagtacaattataatcattcttaaaaaaactagacatctcatttttaatttattccatcctaaagacaacaacgaaagacacggttgtctcaccatcggtgtctctcgtaaaatacacagagagacgaagctgaccggtggtggtggttgaagttttctatggcttttcttgacgtctcgcgatgtgagaggcgatgtgtgtgtgtgcgagcgagcgctagctaggtcaactttgctctcagctctcgctcccgatgccacacgctgacgctgtgctcgttataaacccccggcctcgccggggcctcaccaaccacggccgcgcttcgcttcttcctctgatcagagtggggtgaggcgaagtgctcgatcgggagcggtggtggtggtggggagagagagagagagaacttaacg

SEQ ID NO: 325 - DNA, 2000 bp, Oryza sativa
  source 1..2000: mol_type = genomic DNA
ggacatttgtgccacttgtctagacagtagtgagtgagctagctagttcaactcaatcagttttaagagattgattgccatagtaagttagttatctcccaaaaatttccttcacttggatgcatggttgttggttaattattttttatcgctgtccaatgatcatagttagttagagagttgttgggtatatactatcactgtaaatattatctactgaattacagtgatagttacatgcagctaaccttgatactaaagtattattgttaattatttcccccctttttgagttttgccacatctagggtagaagagcagagtagcactatccacatagctaggcaaatatatggcatttaatagatgaacaagttttccaagttagttaggtggcacaagaaaacaagcagccaacagcagcatggaggactgggagaagatggtcaaaacaaaagaatatgcatgagctcttgatctgtagctgggagaccatagatgttggcagtatgcatgcatgcaaattaaaattcttgataaatttgatgatggaagaaaagaaaaccatatgtgcatattgatatccccatgtcttggtagctgcctgcagtaaatgaccgagtcatgtacacgtttctttctttcaattcgcttagagttcttgcctctttcagtctcaacttttcttctgaatcttctctttcagtctgcatgttctttaactagatagcttttctctgcttttcttggtacattctctgaaccttaacttggattcaccatgcctgacgtatgggcaggcagcccggccttttttccgtttcagaaccacgcatagtgacgcgtttgatcgagaagatttctacgaccagattgacaaccagctttaattgttcttttttatgaaaagaatgtacagtcatatatacatagataaatttaaaattaacctcttctgtctcaattctgaagcaacacgtatacagaaaacacaagttctacatatgtaatcacatagtaagctaggtaaatatataacagatgatgatggtgatgagatcattacgtgcacatctagtagacgtgtttaacgcagcaaggtttactgcacttgagaacatctgctaatagttcatcggtttggcacatctgcttggaccatccattaactatgctcatgtttatagtcaatgactagtttgaaacagtaactcctgagacagaggcagaatttcaaacatgaaaccctgaaagtcgtggcttcatgggcagtccagccaacacgacatctgtgcagtgcttgattagctacttaaatataataacaaaataattaagcaaagctttttctttgacaagagttgcagggaccacgaatgttaggtctgaactcctgaaggctcatatgatcccggcataacactgaggctaataaaggtgacagagggagaggctgctagctgctgaatgcagtgaaaaaggtggtggttttgtggaggaatttgtcaatggcggatttgggaactcagggagaaagaaacggatctgggtaaaggtaggcatgcatggaacaggggattggcatgcgtttggaagggttttgtcacacgccaaatcgacatgcatgctctgctgggatccattgcgcacactgaataagtgggcatatatatcaacaaggacacaggacgtccgcaacgacactggatctgcggtactgctgactaacatatgtgcccctacttagagcatctctaacagtctttctaaatcggtctctccaaacacccatatagccagctgtccaattgatttggcaagccaaactcatttctcactccaatagccactatccattatgagcctatgacactgggacccacacgtctgcctctactactccttcctcctctttctctttctctccctcttcctcctctctccctcttcctcttctctcggacacatcccgcgcgactgcgaccatccagaggctggcg

SEQ ID NO: 326 - DNA, 2000 bp, Oryza sativa
  source 1..2000: mol_type = genomic DNA
cccacaaaacattattagttatctggttataacaatggtgctagctccgtcactgatcatagttatggcaatattttattctaataattagattcttattttaattaaatatttttaatgacccaaaaaaataggataattttttttaggtttcttattttaagttcgtaaccttagagatacatgctaattaagtgtgacaacttcagctcataaatgatgataaactatagccggcaacgaaacagacccaaacagctcgttgaggagcacagcgttcatgcacctcagtccagtgatcgagttggggaccggtggatcatcatggctaatgagtgccaagtttggagtacgacgagtcgacgacgacgacctgccgggatcaagatgagctagcttaacaagctaagctccccacaatcaaggataacgcatggctttggttttgcctttgccggactgcttccatgtttagaggtgtcagcacacagcacgcagtactgtgcgctagctggctgccttggcctgctgccgacgcataaccatcatagcctcgaaccttccagaatttacttttcttgctctcgctgactactaccacaccagtagcttgtggagttgacgagagtaaagttgatgctgttcttacaaggcaagtaggcaacctcgtttgtttttttgttcacgcagctaagcatgttctttctttccaggataaggtcggcctagatacgcccggtacatatcgagctcatgattggcacaatgacactacagttcactttcttttcttttcttttcttttttactgtgacttgacagagagcgtccggagtggtgacagtgctgggtgggtttctgtttgttgttcggcgcgtttggatcgcagctgtcacgcgatggcacacggcgagaatctgcacgggcacgggcgcgcgcggcgccggacacacacggtcgaccgagcgtacgtggagccggcaatgggatgggaggatcaggaggcacgggcgcgtcggctttggcaggcgacgagacgagccccgtaccgcgaccgcgagagctttccgctgagggtggtccgcgtgccgcgtgtgccggtggtggtgtgtgagacgacgcggtttcccccgttggattctcggattctcgcggacgtagcagcacggcggccgtgtggagacagcgcgagcgcacgaagtgaatcagtgaatcatccaccgtttccacacgtaccgaggcgcaggggatcggaggcaagggcgtgtgcgtccacaggccacaggtaaagaagagttgttgagagatttcgtcgggatctcatctattgggggggggggggggggggggatttggagtaggggtggttgtagtacgagggatgggctggaaccgtgtgccgaaataagtagcctctgcctcgaacgggacggctaatttggtggtggtctccgttcaggttggcgcttctcaactggtccaggcggcacccttcactgttcctaagaattgtcaacggctcaacgtttacttgctccgacccataaaaacgtatatttagattcataatcactataatattttgcattcaatattagattgattttttatgggacgaagggagtacgtcggattgggccactagcctccaccacagctcgaacagtgaatagcgtcgcagttaaaatgtactccctccatgtccaattcgttgtactgggagagatcatatccccttctaggctgggattttttagactttttggacggagagagtaaacatttggactcctctctaagtctaaattgctcaattgggctgactccaaccttgttagtgcatcttcaacagcctctctaaacacccatatagccagctctccaattgatttggctagccaaactcattcctccactttctctccctcttcctcctctctctctctcactgttcttctctcggacactcgcacgcgactgctaccgtccaggggctggcg

SEQ ID NO: 327 - DNA, 2000 bp, Oryza sativa
  source 1..2000: mol_type = genomic DNA
tccttagtcctcacacatgaatgatactaataccataagtaaatacagcaagaattcaaaccaacgaacaaaaggcgttgcagtttcaatgttaaactcaacagctggaagctcacagatttgtcaaaatacagtatatatcattcaaacggtcacttcaccggattattgcaataaatcagtaaacaagctattgaataggaaaggcataaatcagaggtagggattagtacaggatggcatggtacattaacctcgaatgctttccaaattcctaacaatataatgtacaacagttcaaaaacagaagaagcgtttgaccagatgacaaaggaaaaaacataaaaacaggatcaaacacctcccatcttataactcgagcaaggtggccacctggtgatctattgatatgtcaaattctttatcaattgaaatcatttatccatagagcaataccaagttattttccaaacatccaaatatggcttacaatgtaatatggcacaatgatgtaaattagctttggacctttatttatgatatataatcaatcagtaggaccaatttggtcttccacgtttcattaacatgaattatttttctaaaactaaagtataaataaatcatacaagagccacggtccaaactggaccaactaaaagatcagcatgaacaatgtaaagattgagtagaacagaacaagaataccaatacaacacaaattaacagaaaatctaccctgatgcaagccagcctacatcatccattacaccatagcattgacagtgactgaaggagtaaagggagcaaggaaggccaaatgccagatgccaatgactcgtttattcggtgagtatatttcaaagcacttggaaatcaagcaacttatttaattgacttactatccacaagtagctcaatcgagacacaaaaattatgttgaatatgatagtatgctcgctgggttggtatgcataaatggatggcaatcacacatcaaatggctactccaaaagatagcagaaaaatcccactccccttgaaaaaatagcacaaaggttttgcgacacaacagagcaaattatgaacagaacttctgcagcaggattaggatccagctagagaagaggtaatgtgaagaccaatcatgccacctgattgttgtacctgatattggaaacagggatatttttagaaaatgcaagcactgtacttgttgctagctagtctgtgctatgtaagttactatgcttctaccaaatattctaccaaactgatcaaagaaggatgggcagttgggcactacctttctttaagaaatgatgcttttatacgatgaaatgcatgcattttatttacaatgcatagttagatgggtgttctgagaatgttatttcactatttcagcatgtaatcttgcaaaacttatttcttctctcccataatggaaattaaaaatacattacattttgcaaaacaaaagattatatagtgtacatgggttgcacttccaagttatgatttttacactttattgaactggccactgtctggttgtctgcaatacagtatatatgtgtgcaagagtagtacacagcatgaaccaaaggaattggatcagacatgaaaacttgaagcatacggtgcacaaagaccaggtccaaggaagaggccagcaataagctgctgccttgctgatggccgcatgatggagattctaatccaagggaaacaacaattagaaagaaagcaacccagatcacaccaccacaaattaaaccgtattttattaccatcacacgcagcccccttttcccgtggcaataatacaatcctctattcctctctcatgtctgccttttgagcacataaacacaccaccctcgccatcatcatgcctaaccaagtttaggccctaatcaacgctttgctctgcacacctcgcaagagatcagagcccctgaaagctagaagaggagatagaggataacccacacgcc

SEQ ID NO: 328 - DNA, 2000 bp, Oryza sativa
  source 1..2000: mol_type = genomic DNA
tcccttttttttctttctcatgggagtggtcgatatgtgcagcgtctaacaccacatgtcctttttcttcgaaaaaagagttctcccttataacttttataaggagtatagatagtttgcattccttgcttgctgctttttttatagatataatttgcatttccttgttgcactgatcattagctcattagttcatcccatgaggacatgatgacagtatgacactacccagaatgattatttttcacttaatatttggagatttatctcgacgtcactgggtggcatataagggatgcgacaaacactccatatcaatcgaggaatttcctctcgtcttgaattatgactgatcatgacttgtcattagagaagttaaagaaaaagatgggacttatcaggagagactaaaaaaagagtagccctacgagtagtttagtgtgttttgccatactaccatgtgatggtgatgtcaaaaacatggggctcgcgtaaccgcaaaactaaggctgtcccagacacactaatcaaaagcattcgaatttagaactcctataatttgttagtttgtttaatcactctttgtgtctcatgatgattcatgcttgcataattgcatacacttctcgactctaagcttggaccacacaacccgtacataggacgaaaccgaaagcatcacccaaaaaaaaaaaaactaatgtgcccctctttagcatgtcagaataatatggaaaaggcgtcgagcagaaacaaatatgtcaagagtttgacaaacctgacaactgccaatgcagccaatgagccaagcagcaacttgttgatggctggtaggctttcccattatattctggcaaaaactttgcttccatttttctattgacgacgatgagttcgccgattccggccgggccggctcagcttttctccttcggctagcgtttggacgcacacttttgagagaatcgaaacacggagagaagtgctccgatgcatgacacctccttttccacgtacttaacgccaaagggaaacaatgatatgcagtgaacacaaagggattgaccctgcccaggatcatcaatacacgttgaggcttcttcgtgtgtgaaagcatggctaactcgtctggtcaaaggcaaaattgctgctatcctaaaacaaatagtactaggataaataaatgaaagggctaatataacactcgcacacacgcgagacgacaaaatggagagctagcacacacgatagggacggctcgacggtaggggaggaggaataatgcaggcaggatgttactatggccacgtttagttggttagtgtgacaaaaaatttttaaaagtatacagacatacataatatatatttaaagtattaaaggtagactaataacaaaataaattacagatttcacatataaactgtgaggtgaatttattaagtttaattaatccttcattagcaaatgtttactgtagcatcacattgtcaaatcatggcgtaattagactcaaaagattcgtttcgcaatttacatgcaaactgtgcaattggtttttttccatatttaatgcttcatatatgtattcaaatatttgatgtgacggaattttttaaagtttaaattcaaatatttgatgtgacggaattttttaaagtttgaagggaaataaacacggcctatggcgcaaaattgtactacaaactccctttcgcgagacgagagaatgcaacgccgtgccgctctggcggctggggcccaaccgcgaaaggcaatccatccctctctctccccgtcgcgtaaggccgctataaatcaacccgtcgcgggttgcattgcatcggtcggtctcggtcgctgccgtccctgtgcttggagtagacacgagccggtgacgcgcatatcgtcttctgctcgagatcgatcgatcgatcgcttggttggttgctgcgactgcgagggaggccgcgggtggtgaggaggattgtgcaaaaaaa

SEQ ID NO: 329 - DNA, 2000 bp, Oryza sativa
  source 1..2000: mol_type = genomic DNA
aatgatgacaccattggaggatgctgctgcattgtcagttgtaactgcccatggacttttggcaggtcagcctagccagcaataggggtccctacaaagagagttacttacaaacagcatggtttggtattccatctagctatgaacattttttttttctatcatggcccagccttgagttagagttcttgacttgagagaagggtacagcaataactgaaaatgcaggacttggactggtcatgcatacccatgctgtgaatcttgatctatatgtacgctgcattgtagagtacacttgttgtcaaagtactggtaactacattattggtgacgtttgttctctctatttctttgagaaaaggaggaattttttcgtatgccgatttttttttttggcgtattcagctttattgcagtacttggtatgatacttcatgtgcacagttcattgtgaaagctgcaagaggttcttgctaatatcacaaaaaacagtttttgaataactatcatactttaaaatagcacaaactatttgatttcagaaatgggaatccatttggatgtgatggcctgtttactgcttattacgagaaaccctaactgaaagtctgatagtaattcttctagttccactattgccctgtttatgatgccaaaattcagagttggagttacactaatttcaggcttccagcagcttcacattatattccatactattattactactacattattataattaaaaaattaatagaatatcaagatcaatcaatgttgcttatctcaatgcggtgtgatcctaagggatgcatggagacaagaaggaaacaagaagactgcattccatgcttatcctttggcacgtttcaatgattcagtaaaggcttcatttcttctaaccatctaggctctaaatcctaactgaatttaactatgttcatggcagttggtttgcaatgtacaggtggtaacactagcttcatctgccacatgacctgcctgaagctagagttcttgacttgagagcataagttcatctttctgcgatacccataaacctacgcagagttcagagtacttactgttcttcgtgatctgtgcactcctaatctctcctaaacccacatgtagctctaaatatatagtgccattttgaatgcattttctcgcatccaccgtttagatttattgagtcgcatgcatcaaccagttcaacttaaaaactcaagaaaacaagacgattcaattgtacttcgacaacgctacaggagtaaggttggtgattttacccctaacagactgggacactactgtttcatgtactcatagacttgtttgtacaggaaaggaccaagaccacatccattgaatttgaggcaaattacaccgtacttaccgtcgaaataactaattttgctataatcaaccactttgccataaaattcacaatttcccgaaattaagctgtgtaatagcaccaaaaattataatctttaaatcaaactaattagttaatgtagattatctataacaaagataacccaaaacaatgattattttgcagagaacagttaggagacagaaatccatgtcccagagaacaaaaaagaggacatatatatgcatggatgacacagaagtttagcaaaaagcacaacaaatcattccatgcacctttctgcatgcattcatgcaatgcagaaacaaaaaggccatgcatgcatctccaaagtaccaatagaccagaacaagagccggtatgtgtgtcatgctctttcagcagcatcagcaatcaaaggtcaaaccatatccgtactattttaatgcactcttcatctgctcctataaatcccagcaccatgaccaaacccatcacaactcatctcatcacattccatacacacatccatagcagcttcaagctaaggtgatactactacattcagagagaagaagcagaaagagataagaggttctgagagagactgagagag

SEQ ID NO: 330 - DNA, 2000 bp, Oryza sativa
  source 1..2000: mol_type = genomic DNA
ctatggcttatattttctattttttaaaaaaaattaaataagacggacgattaaagttggacacgtaaacttatggccgtgcttaaaataggacggagggagtagaggggtactccctccatcccataatataaagcacgcacgtattttaagattcaacatttaaaatatttgaccaacatttagtataatatgaaataaattttattcattaaaaattatatcattagattgagatttaaatttactttcatatggttataattttcttgccagaagccttatagaatatgagaaattataagctaaagattacttttggagaccgtgctaactttgaccgcgccttatattatgtgatagagggagtatatcatagtgttaaataagaggcatataccttctgatctaaacattggaaatatctatgctatatatacaattacctcctcaggattttttttttaaaaaaattttatctcattaatagtcaacttttggatagagaaagtaccacacaatgcattctaagatgaagtgattctagtaaggaggaagtaaaaatttagaaataacgccttcaaattggaccatccaggtacattgggtatttcatttatactccaacacctccctcctatgtcgaggcgctttctcaggtctcaaaatgtgcagtacaatttaattatatcagccaaaaaattgaactcgagaccttaagttgtaaggccacatttagatgcaagcatcggactgttcattcaaaactttaagctaattaggaaaaaggacaattcacttatatttatttcaacactaatacatttagcaaaatgtgcttcaaaatatatgggttgtcagaattgcctaggtatagcatgatggttaaaatccaaccaggagtgtttttttgacatagaaatccaactcgagttcatccagccaataatgtgacaagtccgggtacagcacgcaacagagagaaaaaatggcctttgggaagtaagattgataagcgttgtgaaattggcatgcaattttcaaacacatatataggccacaaaagtttaccctctatctgcctgttacattattaattcagaaacgggaattaattaaagatactaaattaatgctcattctaacatggcctataaattgtcatgttaatcgacaaaaaaaatgcaccatttagtcgcaatgggtccataatgtagtgtagagatcaatcaatacaataatatactacaaagtacgaaggtgttttatttatgaaaatacaagtcaatagttgtacacaaatcaaaaatgcgtacaattatgtaattgagttatatatcaactttgattttcattctagaatctatagctctgcttaaaaaaattgttagttgcatatttatcatatctttttgtagttttaaacagtactctccacacaacacataccctgcaatcgacaacacgacccaactaatagaaactattatatactccctcgtttcctaaatgtttgacgccgttgatttttttaaacatgtttgaccgttcgttttattcaaaaatttttgtgaaatgtgtaaaactatatgtatacatagaagtatatttaacaataaatcaaatgataggaaaataattaataattacttaaattttttgaataagacgaacggtcaaatatttttaaaaaaaattaacggtgtcaaacattttgggatggagggagtataacaaatatttctttaattacctcccctaattaattcgattataatggtataagcatcacatcaagtctctacaagatggcctaatacaaaacacactttctttctcccccttcaccatcaggtctccttgctataaaactcccaccctcacctcccgccaccatgtccacccaccggcactgcaccgccgccgccgctgccgccgacaacgacgaccctgaccataaacggagacggctagcgctagtaataatagtgtacgccgag

SEQ ID NO: 331 - DNA, 2000 bp, Oryza sativa
  source 1..2000: mol_type = genomic DNA
cttacggcacgagctgacgacagccatgcaccacctgtgtccgcgttcccgagggcacccctctctttcaagaggattcgcggcatgtcaagccctggtaaggttcttcgctttgcatcgaattaaaccacatgctccaccgcttgtgcgggcccccgtcaattcctttgagtttcattcttgcgaacgtactccccaggcgggatacttaacgcgttagctacagcactgcacgggtcgagtcgcacagcacctagtatccatcgtttacggctaggactactggggtctctaatcccatttgctcccctagctttcgtctctcagtgtcagtgtcggcccagcagagtgctttcgccgttggtgttctttccgatctcaatgcatttcaccgctccaccggaaattccctctgcccctaccgtactccagcttggtagtttccaccgcctgtccagggttgagccctgggatttgacggcggacttgaaaagccacctacagacgctttacgcccaatcattccggataacgcttgcatcctctgtcttaccgcggctgctggcacagagttagccgatgcttattcctcagataccgtcattgtttcttctccgagaaaagaagttgacgacccgtgggccttccacctccacgcggcattgctccgtcaggctttcgcccattgcggaaaattccccactgctgcctcccgtaggagtctgggccgtgtctcagtcccagtgtggctgatcatcctctcggaccagctactgatcatcgccttggtaagctattgcctcaccaactagctaatcagacgcgagcccctccttgggcggatttctccttttgctcctcagcctacggggtattagcaaccgtttccagttgttgttcccctcccaagggcaggttcttacgcgttactcacccgttcgccactggaaacaccacttcccgttcgacttgcatgtgttaagcatgccgccagcgttcatcctgagccaggatcgaactctccatgagattcatagttgcattacttatagcttccttattcgtagacaaagcggattcggaattgtctttccttccaaggataacttgtatccatgcgcttcagattattagcctggagttcgccaccagcagtatagccaaccctaccctatcacgtcaatcccacaagcctcttatccattccccttcgattgtggcggggggagtaagtcaaaatagaaaaaactcacgttgggtttagggataatcaggaaattttttcaaaatagaaaaaatttatactattaatttcttcacgccggctgcaactacacctcttgcattcttgttactacaaactgttcacagaccaatacaggtataggagtagtatacaagaagtagaactagatactcctactccactgatgtaaacaaaaccatactccactccattgcctgtcattagcactagtagattctcataacactagcagttcagtagtaccattgcctgtcagcgaaaatattggagtactcgcagtactccaattgagaaaatagagtactggagtactttgtcgcgtccttgcgtctgtactagtactgtttgtagtactctgaacaagaaaaacggaagcctgcacagctgcagcctgcaggcgagaatcaagatcgaaacgggaaacaaacaccactctgcactgcagcctctgctgctgaagctgaaccctctcggtaactgcacctcggcctccttttccacacttttcaccgtgttcctcctctctctttctcccacccagcgcgcgatttcccccttttctttttttttgtataagaccttgcagacgacgagacgaggacacagcaagaggacaggacacggcgcgggtacaatacaatacaggtagcctccacttcttgcttgcgtcttcttgtccctcccttgtcatccagaggagatcgaggaggtgttgtgttggtgtgtgtggagg

SEQ ID NO: 332 - DNA, 2000 bp, Oryza sativa; identical to SEQ ID NO: 323
  source 1..2000: mol_type = genomic DNA

SEQ ID NO: 333 - DNA, 2000 bp, Oryza sativa; identical to SEQ ID NO: 324
  source 1..2000: mol_type = genomic DNA

SEQ ID NO: 334 - DNA, 2000 bp, Oryza sativa
  source 1..2000: mol_type = genomic DNA
cggcataacactgaggctaataaaggtgacagagggagaggctgctagctgctgaatgcagtgaaaaaggtggtggttttgtggaggaatttgtcaatggcggatttgggaactcagggagaaagaaacggatctgggtaaaggtaggcatgcatggaacaggggattggcatgcgtttggaagggttttgtcacacgccaaatcgacatgcatgctctgctgggatccattgcgcacactgaataagtgggcatatatatcaacaaggacacaggacgtccgcaacgacactggatctgcggtactgctgactaacatatgtgcccctacttagagcatctctaacagtctttctaaatcggtctctccaaacacccatatagccagctgtccaattgatttggcaagccaaactcatttctcactccaatagccactatccattatgagcctatgacactgggacccacacgtctgcctctactactccttcctcctctttctctttctctccctcttcctcctctctccctcttcctcttctctcggacacatcccgcgcgactgcgaccatccagaggctggcgatggcggcggcggcggctcgcgatgacgacctcggcaacgacgacctcgacgatgaccggtcaaatccacgccgccagtctggaggtcgcacggccggcccaatccggcaggggttgcatggtgacataggcctccaaatgacggcagccatggctggtgacgacgcaaatgacggcggccatggctggcggcggtggctgtcaacggcggcggtcgcggcggtgctcctcagcttaggggatggtgggtgcggaggaaggtcggggaaggcagcactcctccctgtggatggcggccacggcaaaaggcgatggcgacgatgctcctcccacaggtggtgacgatgacaaggcaaccgaggggatacgggggagctcagcagggatggtgagagccggtgtggcggcagagctagagggagaggagaagcatggatacagggagaggcggatagaaggatagccagtctgggaggctggccaatattggccagtgcgtgggttgagatggagaggcatttggcttagagagtcgaatagagagtctattgaaggagtgtttttggttcatttgctaaatttttggcttggaggaatagagaggctgttggagatgcttttactcttaggagtgggtaatactacttgcaagcgatctcgttccatatcaatatgtaacgactttctttttagtgtgctaatgtcatcgtatttgcaggatcatcgcgtgttgtttatcgtatatgcacccgatgacttcaatgaagtccatatgcgtcgacgcgtagtttctcaatgaacgtaatccatttacctatgttgcctttgatagttttgttttattggaaaaaaaaatgaagcaaccctgatcatgttaaaaaggagaagcatgcgcatgtcataaagtataaaccgtgttgatcaatgcactattgttgatttagtcatatgacttagctctagtaccattgtaatagatcatgcgcattttgctaaacataatggattgatatttgcagtatactgataaaagatcagtttcagaggacacacacctgtaagtattcatggttaactagtgcaaatcaattaattaaccgatgtcagcagcagctagcgtaataatcaaaagttggcttggcagagaagatcttggtgagtgcatgtctgacttgactgcatggtagggcggcgtccgttaatccccagcaacacacacacacacacaaacacacacaaaaaataatgtggcggtgtccctataatggagccaaccgtcacatcatcacctcacaaattcacaattctcacaagcccacacccgtatttttctcccggtgtccggtgcctccttcctctctagctatccatctactaaacctactataaagccagcccggccacaaccccag

SEQ ID NO: 335 - DNA, 2000 bp, Oryza sativa; identical to SEQ ID NO: 327
  source 1..2000: mol_type = genomic DNA

SEQ ID NO: 336 - DNA, 2000 bp, Oryza sativa
  source 1..2000: mol_type = genomic DNA
cattttggaattaaagaaatggtcaagctttacacaccacataggctcacaccaatgcttgcattggcacatgcattcatctgcacacactgagattgggtctctgaaatatgcagcaaatctgctgcattcagcagctgcatcgatctagcacctgctccagtggctgcctgcttgctcgtcttgctcatcgtgctagctactagctgcttgctgctgcttgcctgccctcatatttggccagttccagtctgtagctttcctagtacaaagatgcatgttatttttacacacgacaaatacacgaacctggcgagctatcgctttcagtcctccacctacatgttgttgagctagaacttgtcaatctgtcatacgcgtgaccaagggttaaatatttgagaaatcaaaaaataaacatttggggcacctaaattccgaaatcgatctcctgatgaatagcttgaaattctgaataattttgctaaaaacttagtacaaattctctgccgaatagccacctgtaaactggaaattgttagacggaaatactgaatcgagaggcagagaaattaagccattaatttgtctaggttctcttattaaaagaacatttgtctagtgatcagaagttgcttcggttatgtatgtattcggccctccatggaagaaaaaaatacacaagagaggcagtgatttcaaaggttggcacctaccctgcgtccctggccaataataggatagccaggtcttattgttgatcaaaggactccggccggctagctatagactttcagcgtagtaaaactctctttttgcagtaatttaattggcaatttgccatgggacaactcattcaaggtgcaacagtacgttagggtccacgtataattgattggttttattcttaattaatgtgaacatattttaattgcttgctatatatgtataatttaacttagcaatggacttatattcttttttggcaacgaaatgactatgcaaattattaacgctctcaaaattcataaaatcgcatatatggttgaatggatgaacaaaagctagctttaattaaaacacaatttggaaatagttattcctaaatttttagacaatgtacaagtgtttatatttctggccataaaacaaaaaagaaaatattctaaaactctctagagaatagagaaaaggctaacggatctaggtcatgttaaatagaattctgatttattttattctcgtttctcataattgtcattactatatatggaatcatagataactatacaattgaaaataataatttgaaagagaaattaatcattcacctaacttttgtctcctcggaacaaaaatggcatcttccatcagaaaggcttaaccattttccaatgtacttagtgatttactttatccgtgactctctactacctgcaaacatgcacgcaagattccatgtgcaagtgtactttgtctatagggaacagtgatcatgactctggtagtaacgctatcaagtctccatggaaaaagctctgaacaaccttttcttccctctgtgcttagatttgaaggggccaaccagcagcctggaagggtgattaattgaagccaaacaaacacaagcctacacactttgacttgttaacatcttcactatagtctctctctctctctcttccatctctctcactggtcttatatatttttctgtttgctgtttgttggcttgtgctgctctcttctctgtgcctggctttctgtgtcccaatatatctcctgaaaggcagtgtttctctgtctctctctatgtcctctagctagatagtagatagcacagaggagagagctctagcttagctgctgctgccccggcagctagctacaaattaagaaaagggttaggagcagtgggatttggtagtttggtgcgtgtgtcttgttgcttttagcagcttggagttgaggcaaaaatccaattctgctcaattggactc

SEQ ID NO: 337 - DNA, 2000 bp, Oryza sativa; identical to SEQ ID NO: 328
  source 1..2000: mol_type = genomic DNA

SEQ ID NO: 338 - DNA, 2000 bp, Oryza sativa; identical to SEQ ID NO: 329
  source 1..2000: mol_type = genomic DNA

SEQ ID NO: 339 - DNA, 2000 bp, Oryza sativa
  source 1..2000: mol_type = genomic DNA
ccatgagtttccatgtccaactttgatcatccgtcttatttgaatttttttttataattagtatttttattgttattagatgataaaatatgaatagtactttgtctatggcttatattttctattttttaaaaaaaattaaataagacggacgattaaagttggacacgtaaacttatggccgtgcttaaaataggacggagggagtagaggggtactccctccatcccataatataaagcacgcacgtattttaagattcaacatttaaaatatttgaccaacatttagtataatatgaaataaattttattcattaaaaattatatcattagattgagatttaaatttactttcatatggttataattttcttgccagaagccttatagaatatgagaaattataagctaaagattacttttggagaccgtgctaactttgaccgcgccttatattatgtgatagagggagtatatcatagtgttaaataagaggcatataccttctgatctaaacattggaaatatctatgctatatatacaattacctcctcaggattttttttttaaaaaaattttatctcattaatagtcaacttttggatagagaaagtaccacacaatgcattctaagatgaagtgattctagtaaggaggaagtaaaaatttagaaataacgccttcaaattggaccatccaggtacattgggtatttcatttatactccaacacctccctcctatgtcgaggcgctttctcaggtctcaaaatgtgcagtacaatttaattatatcagccaaaaaattgaactcgagaccttaagttgtaaggccacatttagatgcaagcatcggactgttcattcaaaactttaagctaattaggaaaaaggacaattcacttatatttatttcaacactaatacatttagcaaaatgtgcttcaaaatatatgggttgtcagaattgcctaggtatagcatgatggttaaaatccaaccaggagtgtttttttgacatagaaatccaactcgagttcatccagccaataatgtgacaagtccgggtacagcacgcaacagagagaaaaaatggcctttgggaagtaagattgataagcgttgtgaaattggcatgcaattttcaaacacatatataggccacaaaagtttaccctctatctgcctgttacattattaattcagaaacgggaattaattaaagatactaaattaatgctcattctaacatggcctataaattgtcatgttaatcgacaaaaaaaatgcaccatttagtcgcaatgggtccataatgtagtgtagagatcaatcaatacaataatatactacaaagtacgaaggtgttttatttatgaaaatacaagtcaatagttgtacacaaatcaaaaatgcgtacaattatgtaattgagttatatatcaactttgattttcattctagaatctatagctctgcttaaaaaaattgttagttgcatatttatcatatctttttgtagttttaaacagtactctccacacaacacataccctgcaatcgacaacacgacccaactaatagaaactattatatactccctcgtttcctaaatgtttgacgccgttgatttttttaaacatgtttgaccgttcgttttattcaaaaatttttgtgaaatgtgtaaaactatatgtatacatagaagtatatttaacaataaatcaaatgataggaaaataattaataattacttaaattttttgaataagacgaacggtcaaatatttttaaaaaaaattaacggtgtcaaacattttgggatggagggagtataacaaatatttctttaattacctcccctaattaattcgattataatggtataagcatcacatcaagtctctacaagatggcctaatacaaaacacactttctttctcccccttcaccatcaggtctccttgctataaaactcccaccctcacctcccgccacc

SEQ ID NO: 340 - DNA, 2000 bp, Sorghum bicolor
  source 1..2000: mol_type = genomic DNA
agtatagtagtttgaaaagaatgtagcccgtctaattaaatgaaatattgtgtgtatatactccatctgtcctaaaatataagatattttaagatttaaattttatcctacaatacttgaccctctcacttcttaatgcacatttttcttcttttaatacttatttttattttccaaatacatttctatttttatttctctctatctctctcctccttgtttctgtgcttaatacttttttactttttcttagttcccgtgctcaaaactaaaacagtgaattaaaccctgatcatgacttatgagtcgcggacaaacggtgtagtattcccggtgaagaaattcattgccagacacaaaaaaaaaactactcctgcctatttccacactttacgagtatttccagggtgcaagcaaggcaagtactaaaatgatgcttagccgcccaaccagtgcgagccaactcaagtttttaaaactagtggtgcatccgcataacaatttgttattgcgccgttgcaattgcattggcccgctcggagctggacgcgttgcatttgcgtacacgcatgcagcgggtgcaagacatgggcaacgccgcaacgacgaccgtatatacgtatgtacacgccgtacgcgtgtatataggtggggttccggagcagccataactcaaagtacgatttgttgcgagagaaaacactactaaataatagaaagatttgacggataatgcagatgtatagcatccgggatccgagtcgagacagacagtcctattttgttattgctactacatgcatgatgtgcatcagctagtgtgtaagatagttcgaggaaataatcagtctgccgtgactttttcagaagcaacgatgctctgaattggaatgcagaagctcttatcaaacacaagtgactttcgcaccatgcttatcgcttcaaaatgtctagtggatgcatggatagatcagataatacgggacttgaatcttggtgcaataaagcgtgggccatcacgtaagatgtactcgaacaattttgtattattatttaaaaaaaactaagcagtttgcttctatatgtgatggttgtcgccggcagtctgccgctttgtccggcgccggcagccgacggccactttctttcctgatgcctgatgctggatttctggtcgctgtaggcagctccattaaaaaccgcaagtgacacttaactaatcccgtgttgattgccgattgggctagttatagcttaatatcatactatgatgaagacccatgtcgtccttgaacgatgtactgaacagctcaacaaatcacgggtctttatcaaatatcaagtgctcattaccggggattcgtctttagagagaagaatcattcatatgaaagaacgtcttagggcatgtttggatcgcgattgatgactgtgcagtgctcatggcatagacggtgcttcgcttcttttgaccgctagcgcaatgaacacgaatacaaacacgcccttaataaccaagtcctggcacttacgcttcgctccttcaagcaagcagttttttcattattcagtctcattctacttactaacagactgcagtagaaaaataactgaatctcaccgggttggaactgaatctcagttgttcaaataatacgcattctgatatttaaacggccttatattttgcttatacacggacaggatcaaggcacgcggatccatgtgctccgagtgatgtgcaaggcttcgtggaatgccggcaaggaagcttccatgggatattctacatcattgcggtgttccccatccccatggacggtgcaatttgcaagcccatctgctgatctgcagcagcggccacctgctgacacactgttcagaaagtggacttcctgccccaattttttaaaatttgaactttttttaaaaaaattctcatttggacccctagaaagcttaatctcagttttggacccagggggtcgacgccatgcttc

SEQ ID NO: 341 - DNA, 2000 bp, Sorghum bicolor
  source 1..2000: mol_type = genomic DNA
accgcacgggatcgagcttatcctcttgcctagcaatcgatccaccgccataccaatttgtcatatttattattattctaactcttacatccgaacgtcttcagttagagctagttcagggctaacctccagccaagctagagtatccaaacacggccacgcacctgctgacccgctggtgtccgtcaaggaaacaacttgctaggcctataggaagccagtcatgtacacgagcaccagtacgtgcattcgtcaagcaacaggaagccaatcgtttcttgcattgcatctcccacacgcatgcactcatgcatcctagagacttcatgaccatataggtcatcagttcacaccaatataatgcacaatgccggcctatgcatgcgccagcatctaatacccaagcgggccatgccgccacaactttgctctcatcgtcgcgacgaggccagcaatgtccaccgacaccgagccaccgacatggagtcacaaatcacagatttgcgctcatgtatgtatccacttatccaggatatacaatgcaattatgagaaggcaatcaaacatgcccttaagtttttcgtcttccgaccctttcaatctatagaattttcaattgttagttgccttatatatggactttgtgttgcctttttatttagtggtcacagctaggaatggatagttttttttttattttggggttatcagaatactttaataatatgaactagttgatgctccgcttgttgctgcgggatgttgtacttaggaatttattaggacagatatgtcaagtaaagtgaaaggaacataaaacctagctatgaattcattgaagaggattatataaattgttactataggtttacacagcgcatcaatctataagacaaagtggcatatggtgagtactctgtattataaattttgaataaaagaataaaaataggctttttatcatcatcttcatatagatccaaaataattgctgagaataccggatgtggaggaatggataaagagtagtaggcatgtaggagcagacttaaccggtggtgcttttattgacctatatatgtttcattgtttatcatggtcagttcccttcaatcctgcacatggagcttaagggatcttctaggtgcgataacgtggaagaagaagagggtgagaataagatatatagagatggttattttctgaccgtctccataaataaaaagatcgagtccgtcaattaattttgtgaggcgatctcgtctcccttaattgtccggcattttccgatgcattaccatctctgttaatgttttagcactgcctcacaatttttttttgtaatagtgtatgtgcctataaattattattaggtttattgtaatatattacattgttaataataatacaacaaaagcaataacctggtacacttttatcgtcctagcagtacgacacaagcactaaaagtgggaggatatgaaattcttacacccaaaccttacaaccctagcagtccaagtacgtacttttaaaatttgtcaaatacgtacggcggctgcgtactcttcttaatagtaatgtacttacatactgattcgaattacatcatccacatcaattatgttggtgtatggttcgtgtgccaggtctacacggaacacacgcgatcttttcggtatctgcttctcgggttgtttggaggctgttgaacaaccgggcgtgtcaggtcgtcacaaagcacccgaatggacggtagacactccctttctgcagattcacctgtacaaaaatcccagacacaaacattggtagttatgcaacccctccaaccccaactgttttgcatcagcctctccgactttgactagtacactccacggctccactgctatataaacattgcccccagatcgacccatgtattcaagtcacaaaccccactctctttactcaaacacaaaatcctcatacactctctccgacgcgcatcgtcaacc

SEQ ID NO: 342 - DNA, 2000 bp, Sorghum bicolor
  source 1..2000: mol_type = genomic DNA
agcaaagagttcaaaagaaagtgttgtgtcaccagattctaagtcaaacaagaaggtttctaaatctaaaaaggatgatggaaaagaaacccaaaacaataaagctgccaggtcatccaataagaataaaggtataagtttggtaatgcttactacatgcagtgtctattgattggtattgttttggtccatacacgtaccaatctgattattgccaccccagtgcagctttgagttcaattgcgctggttaatttaagacagcaagtttttttttccttttatacattatacaaaaatcagtttcagttaaaaggcttgtgacctgtgatcatacattagtaaaattttgagatgacatatacatgagtttgcatactttgcttgactgccattttttttaagatgacatatacatgactttgcatactttgcttgaccgccatagctctaataagctattttctgtctatgttctgcaggaaaaggcaagggtggcgcagctgctgggactgccccaaccacagaacagcttcatgctgttgttagcagcattttgaaggaagttgacttcaacacagtaagcaattgattatgttttgaacatggtccgtagtttatgtgctttgtattctgactggttatgtttttttttatgtaggcaactttggctgatattctcagacaattaggtacctttttatgctgcttaaatatcattgaattagatatatgaaaaaattgttgatagaccaactctaaccttagttttctaacagacgagtgtactgacacgtttggttcttttgttaaacccagggacccattttgaaatggacctcatggatagaaaagcagaagtgaagcgcatcatagaagaggtaataaatagtatgtctgatgatgaaggtgaggaagattcagaagatgaagcagacgacaatggtaaggtggagaagtcaaagagtgatcccgatggaggtgaagagaagtgatcctgtggaccagatgtgccatgttcagatcagtctcttgttaatctgtggtttagattgaacttggactattttcatgccagttctcctgtttggaggattggctctgtacaattggggcaccgcaagacgagccggtgacctgggtactggttacaagattgttaaccatttcacagccatacacacctagttgtgcttgacttggtagtgaatgtagtctagtcgctggtcatgtacgatagctttgcgattaatagtttggttgcttaggtagctagcctgactgtaatatgcagaataattcttggcttgtttcatccatttatcatgtaaaactctgtatctgagttctgaatcgttcccgctcattgtatttcttatttaccttgccatagcaatgtaagcagtgtgcttctatgatatgtgagcatttttgttgggtcctttttttgtgtgatcttatgcgtttccaagtgctcgtctcatgagttctgacgcttcagttcgccatgtgtgcactgctgctgtttggtgtttcttttgagggaagcacgtatgccatctgcaagagcagatgagctgcctgtggatggtctgtagatgagatacttttgaattctgatgataataatgaccattgaccacagctgtagtcactgtctatgcatctgttactcttttttgtcagtcattttttcatctcatagtttgatggttgctctcgcatcggtctaacggttttccaaacttgatgctctctgaaatctagaataccatgttagttggtctaccgacatggctaattcgtccggttttctgacactgttgttgtgcctgcttgccatttcccctatcaacctttaaaatttctgcacaacattatacgatacgaccatgttagtcccttaaaccgtttggccgcgatcattggaatacggtacgacgctgcattggacaggccgtcccgattctcacctgcttggagaactactgcgggcattgc

SEQ ID NO: 343 - DNA, 2000 bp, Sorghum bicolor
  source 1..2000: mol_type = genomic DNA
tgtacaactaattattttttatctatatttagtatttatgtatatgtctaaagatttgatataacagagaatattgaaattttttgaaaacgcctttgacgatatcacgactagtccaggttcgagccggcagtattctctttagtttatggtttgctttttttcttattcttatgataaaatcctagaaatcaacatggcttcattggttttaacttcgaaaataataaaatttacaatgaattacaacctccggccaaatattacaatatttcaaagtgaaattcgcattggtgtcttgtgctcaccttgcatatagtctagctttggttttccaaatcgccttgaatgtgctaggcttagaccatgtggggccctgtttagtttcaaaatttttgcaaaatggttacggtagtattttttatttatatttgataattattatctaattatggactaactagacttaaaagattcatctcgtaaattatagatatactatatatttagttattttttatctatatttaatgcttaatgcatgtgctgcaagattcgatgtgacgtgaatcttgaaaaattttgcaaaatttttggaaactaaacaacctcttggaagttattgcctttcttcatatctgttgcctgttgggtttattaggattaaagaggatgggttaagactagtctcgatggagattttattctcacttttcaagacttatagctcttagttcatcttcagtggcatatctatattttaaaagttgtgcagaagagttttattcccattaaactttttctactcctataaaactcttatcatttctctcttcattaatatggtgccacatcaacatatttaacgcccataaaactctattgaaaccgcattgagactgaccttagtctccaatcctatgagaaatgattgatctaaaggagtcatcatgtactagaaatagtataaacgaattttatcttcataaatttcattttatcctataaaccttatatcaccactcttcatttatattattatgttgtgccagcttacttaatgcaaaattcttataaaaccactactgaaactagcctaataaaaccggcaaaacatatataacttgtatttatgaaaactagtcaccttacaaattaacaatcatttttaaatacaaagccaaaccttaagtatgcatttccatctctaaacatatataaagagttcgtctaaacctcaaattgcctttttgtaagccaacagcagttgctctgtctataaatcaagaagaaaaaagattttaactttacacacacgaaacacacagtggaacccacatgcctcacactgcaaaaaaaaaaaaggaatatacaaatttgaactgcacacgcccttttccgctcttctgtgacttcctttgccctccaaatgcaaactgctgcactgtaatgaaaaagttctcgaaaatacagtgattactaaactgatttattttgatgattgacacaaggtctatcctctttgtttcatttcactgcaaagatattctttccttttaccagaggacaacagatgacaagtcagagtatgcagagtacgctatagttcgttaatgttttatatattattttatttacgtagagtacagataaattaacaatgtcgttttcacggatttggtgtagatagaatacttcaaaaatattgttactctccctttctgcagattgtctggtacaaataaatctgagacagagcaacattggtagttatgcaacccctccaaaccccaacagttttgcatcggccccccctccgaccttgacgtactccttcaagttcaagcaagccaccattattactatataaacactgcccccacagaaccactctactcaaatcacaaacctctctctctctctctctctctctctctctctcatctcattctctctctacgagatcatcccacacacactactcacatcgtcaattaatc

SEQ ID NO: 344 - DNA, 2000 bp, Sorghum bicolor
  source 1..2000: mol_type = genomic DNA
tatcggtactacgcggctgtttggcgcgggaattggtgaacgggagacgacggcgggctgtttggcgcgggatcgattggccgcgcaggaaggagtgccgcgaaacaaaatttccaggaaaaaaaaagatgatggacttggcattttgcataacggttggagatcacccgattttagtcttgccatttttatttgggggtttgcaatttgcctaaaatgcataacttcaaatgcataatggttggagatgctcttatcggcctaaatatggttgggccaagcccaaaaacctcaacaagctctgtctgtggagttccgttacaaaaactgtgaaaacttgagtaaatagttcgacaaaggacatgctaggtactagtaggagtataatgccttttgcaagtaaaacaaaaagtttgggaactaaaccgatcgaaacaaaaatgaggatgatatgatatgtgtgaatactatagaccgaaatgcattaacattgttcacttgtatggatcagaaatcctgtacatttagatgccagcatggtagctgtggggcacggtagatgtaattaattccattgtctacattatcgtcgtgcatacattcagtcctactgctccgccggttcagtccatggcattcacatagtgcagaccatcctaaatttagagggtgtttggttgaggtgttaaagtttaataggtattgtagtattttcatcttatttaacaatttatgtccaataattacgtctaaaagattcgtctcccaaattattgtttagctgtgtttttagtttcataaatagtctacatatatgtagtacttcatgcatgtatttaaatattcgatgtgacggaagttaaacttttccagatacaatcaaacactgttagtactcgacttaaatgtgtgtatgatagagattcagattcttgtagtaacgtttcagttttagattctctcaagaaatattttaaataatgaattagaattacttcgtgagattgttttgatggtagactggattctaatttacagtaatatatttttcttagaaatagtataaataaaagtatgctttagaaaaaatcttaattttttgaagggcaaagaacaacataaatgcaaatgattttagtttattacactaaaaaaattataatcaaataaaatacataatttttagaagagaaggagtactagaatcactacaaaaccagcatatagccaattccagttcctaggcaaagaagcaggaacatttttaggtcttgtttagttcccaaaaactatttttgggttccacgcaagaatccaaaatgattcccctatccaaatggccccttagggcactcacagtgcagactctatcatagagtctaaagttatttattacctcgaacaatgtggacttagagtctaaataagacttggagtcttatttttttctacatctttcttcaataaatatgctgccacatcgcggtatacatacattttgtttccaggtgcttcattttatggagatggagcctgtggcaccgtgatttgagaacctaataattaatttggtaccaagaaccgcattttttttcgagaacgtgctgtgcacgtagagaacaccgttaccggtggatatctctcccgtgtgctcggtctctccagcatcatcaacagaggcgaagcggcagctcaccgacaggcgacaatgccacgaactaattaaaaaagttgtctaggtgtggccacacaataagttgtagatcctcttgcaatacactgatatgcttgttagtgatagactacccaataaggcaagctgtgacaacaaaatgagttggtctagatctagtgtctgatatattggttccattggtctgaattggttgtactgtaaacccaaatttttaaaatttggctttttttttgaaaaaaattctcattggacccctagaaagcttaatctcagttttggacccagggggtcgacgccatgcttc

SEQ ID NO: 345 - DNA, 2000 bp, Sorghum bicolor
  source 1..2000: mol_type = genomic DNA
tatacagtttatctataaatcacgagacgaatcttttgatcctagttagtccataattgaataatatttatcacaaacaaacgaaagtgctacaattccgaaaagtagtgccgtgtcaatctgtgtgcacgcgtgatgcagacacgcacgcacgcaatacaatagctagcagtctagcacgcgactcgatctggagtctggattaggccggccatccacaccctgtcacctcacctgctcaacctaatccacatccatctgagaggatggtccagctgagagaagacgcaaaagtgcaaaaggtatggtatggtcctatacatctgagaggtagctcctatggattactttggacttgcagatgaatctcgttgttatagatgagaataggaagaggaggatcttgttaggtcccactaggttagagtctaattcctccatcgtggaatacaattcattatgattttgaaaatttatattgcaatataagagatatagatgtacacatgtattaaaacaaccacaatgtttttaaaaagtagtccatagagaatttaatattcagtaccaggtggttggaatattgtggcagtgattcataagaaagaaataacaaaagctatccattacactatggccagcctataaaacaaaaagaattagttacacagtacatgtgggacaaagggttgttggcttgtgcaggtagctggacccacaaccggtcttgatacattgtgtcttctaacttaacttagactgggcaaaaataatcgaaaattaaaactgaaatcgaaagaaccaaaataaaaaccgaaagaaccaaaataaaaaccgaaagaacgagaaccaaaaatttcggttagctattcggttctcagaaactgaattaaccgatcaatttttggttcctaggcttggttaaatgaaaaaccgaaagaactaaaattcacaaaacaagtccaataaaccttacaacctagggctaatatcatcttaatcctaagatataaatagggcagaaatttgaatgatgcgtcgccgacacgagggcagtgccctccgtcaagttatcatgaatcatcagatcagcgagtagagccagtgttagccttttatctaataaatgtgcccctcctaaaagtcggggtttgttgcacgtattagctctagaattactatggttatccgagtagcacataccatcaaacaaactataattgatttaatgagctattcacagtttcacattgattatttctccgctgctatgggtcacttggttatttgtccccaacattattttttatgctggtgtaaatcttcgattagttcggtcggatccggaaccaaaccgaactaaccaaaatcgattttgcttggttccaaaatttgtaaaaaaccgatctattcctatttgtagagaaccgaatttgtatcaaaaatctagaaccgaatcgaaccaaactgaagaaccaaacgtccaggctgaaacttactatggactcttgctgtaggacccatctatatagagtggttgatctaaatatattgtggttgctcttatattctgaggtatacttgttgtcaaatactaacgaaagcaagatgtgaacatatattctcgtgatcctgacaagtctacttacacacggcagccggatcggcatgcttttttgctgatcttctttgaaccagcatgggattttctagataagtaatcatgacatgataacactcttcaacagattactcaaatcatccctaatactaaagaaacagctaacataggtaactgagtgctccaaagagattactcaatactcattcaatccataactaatttttctaatatttaggcctcgtgtcacggaagagagagaagggagaaagaggtccaattttttaaaatttggccttttttttgaaaaaaaattctcttttggacccttagaaaacttaatctcagttttggacccagggggtcgacgccatacttc

SEQ ID NO: 346 - DNA, 2000 bp, Sorghum bicolor
  source 1..2000: mol_type = genomic DNA
ccgcacgggatcgagcttatcctcttgcctagcaatcgatccaccgccataccaatttgtcatatttattattattctaacccttacatccgaacgtcttcagttagagctagttcagggctaacctccagccaagctagagtatccaaacacggccacgcacctgctgacccgctggtgtccgtcaaggaaacaacttgctaggcctataggaagccagtcatgtacacgagcaccagtacgtgcattcgtcaagcaacaggaagccaatcgtttcttgcattgcatctcccacacgcatgcactcatgcatcctagagacttcatgaccatataggtcatcagttcacaccaatataatgcacaatgccggcctatgcatgcgccagcatctaatacccaagcgggccatgccgccacaactttgctctcatcgtcgcgacgaggccagcaatgtccaccgacaccgagccaccgacatggagtcacaaatcacagatttgcgctcatgtatgtatccacttatccaggatatacaatgcaattatgagaaggcaatcaaacatgcccttaagtttttcgtcttccgaccctttcaatctatagaattttcaattgttagttgccttatatatggactttgtgttgcctttttatttagtggtcacagctaggaatggatagttttttttttattttggggttatcagaatactttaataatatgaactagttgatgctccgcttgttgctgccggatgttgtacttaggaatttattaggacagatatgtcaagtaaagtgaaaggaacataaaacctagctatgaattcattgaagaggattatataaattgttactataggtttacacagcgcatcaatctataagacaaagtggcatatggtgagtactctgtattataaattttgaataaaagaataaaaataggcttttttatcatcatcttcatatagatccaaaataattgctgagaataccggatgtggaggaatggataaagagtagtaggcatgtaggagcagacttaaccggtggtgcttttattgacctatatatgtttcattgtttatcatggtcagttcccttcaatcctgcacatggagcttaagggatcttctaggtgcgataacgtggaagaagaagagggtgagaataagatatatagagatggttattttctgaccgtctccataaataaaaagatcgagtccgtcaattaattttgtgaggcgatctcgtctcccttaattgtccggcattttccgatgcattaccatctctgttaatgttttagcactgcctcacaatttttttttgtaatagtgtatgtgcctataaattattattaggtttattgtaatatattacattgttaataataatacaacaaaagcaataacctggtacacttttatcgtcctagcagtacgacacaagcactaaaagtgggaggatatgaaattcttacacccaaaccttacaaccctagcagtccaagtacgtacttttaaaatttgtcaaatacgtacggcggctgcgtactcttcttaatagtaatgtacttacatactgattcgaattacatcatccacatcaattatgttggtgtatggttcgtgtgccaggtctacacggaacacacgcgatcttttcggtatctgcttctcgggttgtttggaggctgttgaacaaccgggcgtgtcaggtcgtcacaaagcacccgaatggacggtagacactccctttctgcagattcacctgtacaaaaatcccagacacaaacattggtagttatgcaacccctccaaccccaactgttttgcatcagcctctccgactttgactagtacactccacggctccactgctatataaacatcgcccccagatcgacccatgtattcaagtcacaaaccccactctctttactcaaacacaaaatcctcatacactctctcagacgcgcatcgtcaacc

SEQ ID NO: 347 - DNA, 2000 bp, Sorghum bicolor
  source 1..2000: mol_type = genomic DNA
ttttttccttctatacattatacgaaaattggtttcagttaaaaggcttgtgacctgtgatcatacattagtaattttgagatgacatatacatgagttttcataccttgcttgactgccaatgattagtttttcgagatgacatacatgagtttgcatactttgcttgaccgccatagccctaataagctattttctgtctatgttctgcaggaaaaggcaagggtggtgcagctgctgggactgccccaaccactgaacagcttcatgctgttgttagcagcattttgaaggaagttgacttcaacacagtaagcaattgattatgttttgaacatggtccacagtaagcaattgtgctttgtattctgactggttatgtttttttatgtaggcaactttggctgatattctcagacaattaggtacctttttatgctgcttaaatttcattgaattagataaatgaaaaaaattgttgatagaccaactcaaaccttagttttctaacagacgagtgtactgacacgtttgtttcttttgttaaacccagggacccattttgaaatggacctcatggaccgaaaagcagaagtgaagcgcatcatagaagaggtaataaatagtatgtctgatgatgaaggtgaggaagattcagaagatgaagcagaagataatggtaaggtggagaagtcaaagagtgatcccgatggaggtgaagagaagtgattctgtggaccggatgtgccatgttgagatcagtctcttgttaatctgtggtttagattgaacttggactattttcatgccagttctcctgtttggaggtttggctctgtacaattggggcaccgcaagacagccggtgacctgggtactggttacaagattgttaaccatttcacagccatacacacctagttgtgcttgacttggtagtgaatgtagtctagtcgctggtcatgtacgatagctttgcgattaatagtttggttgcttaggtagctagcctgactgtaatatgcagaataattcttggcttgtttcatccatttatcatgtaaaactctgtatctgagtcctgaatcgttcccgctcattgtatttcttatttaccttgccatagcaatgtaagcagtgtgtttctatgatatgtgagcatttttgttgggtcctttttttgtgtgtgatcttatgcgttttcaagtcctcgtctcatgagttcagacgcttcagttcgccatgtgtgcactgctgctgtttggtgttttttgagggaagcacgtatgccatctgcaagatcagatgagctgctggtggatggtccgtagatgagatacttctgaattctgatgatagtaatgaccattggccacagctgcagtcacagtctatgcatctattattctttttttgtcaggccttgtttagtttgcaaaaaaaattataatttttttttcatattcttcatcacatcgaatcttacggaacatgcatagatcattaaatatatataaaaaataactaattacacagtttgtcaataaacttgatgctctctgaaatctagaataccatgttagttggtctaccgacatggcatggctaattcgtccggttttctgacgctgttgttgtgcctgcttgccatttcccctatcaacctttcatgtttctgcacaacattatacgatacgaccatgttagtcactagtcagtgcccttaaaccgtttggccacgatcattggaatacggtacgacgctgcattggacaggccgtcccgattctcacctgcttggagaactactgcgggcattgcatgctggttgcgttcctcggctcactcaatccaaatgtcctaaccaccttgcccgtgcacacgcacaagaaacctctcttcttatacgccttctccctcgatctgctcctctacaagttcttgcacgctgtagtcgtccaggtccagatccgatccgttgctgctccgactccgacaat

SEQ ID NO: 348 - DNA, 2000 bp, Sorghum bicolor; identical to SEQ ID NO: 343
  source 1..2000: mol_type = genomic DNA

SEQ ID NO: 349 - DNA, 2000 bp, Sorghum bicolor
  source 1..2000: mol_type = genomic DNA
aatcttttgatcctagttagtccataattgaataatatttatcacaaacaaacgaaagtgctacaattccgaaaagtagtgccgtgtcaatctgtgtgcacgcgtgatgcagacacgcacgcacgcaatacaatagctagcagtctagcacgcgactcgatctggagtctggattaggccggccatccacaccctgtcacctcacctgctcaacctaatccacatccatctgagaggatggtccagctgagagaagacgcaaaagtgcaaaaggtatggtatggtcctatacatctgagaggtagctcctatggattactttggacttgcagatgaatctcgttgttatagatgagaataggaagaggaggatcttgttaggtcccactaggttagagtctaattcctccatcgtggaatacaattcattatgattttgaaaatttatattgcaatataagagatatagatgtacacatgtattaaaacaaccacaatgtttttaaaaagtagtccatagagaatttaatattcagtaccaggtggttggaatattgtggcagtgattcataagaaagaaataacaaaagctatccattacactatggccagcctataaaacaaaaagaattagttacacagtacatgtgggacaaagggttgttggcttgtgcaggtagctggacccacaaccggtcttgatacattgtgtcttctaacttaacttagactgggcaaaaataatcgaaaattaaaactgaaatcgaaagaaccaaaataaaaaccgaaagaaccaaaataaaaaccgaaagaacgagaaccaaaaatttcggttagctattcggttctcagaaactgaattaaccgatcaatttttggttcctaggcttggttaaatgaaaaaccgaaagaactaaaattcacaaaacaagtccaataaaccttacaacctagggctaatatcatcttaatcctaagatataaatagggcagaaatttgaatgatgcgtcgccgacacgagggcagtgccctccgtcaagttatcatgaatcatcagatcagcgagtagagccagtgttagccttttatctaataaatgtgcccctcctaaaagtcggggtttgttgcacgtattagctctagaattactatggttatccgagtagcacataccatcaaacaaactataattgatttaatgagctattcacagtttcacattgattatttctccgctgctatgggtcacttggttatttgtccccaacattattttttatgctggtgtaaatcttcgattagttcggtcggatccggaaccaaaccgaactaaccaaaatcgattttgcttggttccaaaatttgtaaaaaaccgatctattcctatttgtagagaaccgaatttgtatcaaaaatctagaaccgaatcgaaccaaactgaagaaccaaacgtccaggctgaaacttactatggactcttgctgtaggacccatctatatagagtggttgatctaaatatattgtggttgctcttatattctgaggtatacttgttgtcaaatactaacgaaagcaagatgtgaacatatattctcgtgatcctgacaagtctacttacacacggcagccggatcggcatgcttttttgctgatcttctttgaaccagcatgggattttctagataagtaatcatgacatgataacactcttcaacagattactcaaatcatccctaatactaaagaaacagctaacataggtaactgagtgctccaaagagattactcaatactcattcaatccataactaatttttctaatatttaggcctcgtgtcacggaagagagagaagggagaaagaggtccaattttttaaaatttggccttttttttgaaaaaaaattctcttttggacccttagaaaacttaatctcagttttggacccagggggtcgacgccatacttcatggcgtcgaggttacacgtctcgacgct

SEQ ID NO: 350 - DNA, 2000 bp, Sorghum bicolor
  source 1..2000: mol_type = genomic DNA
aaaaaaaaattgcagcacccggtggggtagctcttcttccattcctgtagggcctgtagcctgtactaggacggagagcgcaggcgcgccggggcgcagggcgtttccatgggggcatggccgcataccagagcgcccggtcaaccccaaggagcgcgttgctgttgcaagtgggtgaacggcgcccggggcgcgtcggcgcgcccggctgcggaccgccgcctgcctcgctgtggacgaggtcacaagagcctgtgcggtggttacgaccatgcttgcaagtttgcaacggtgttgcacgctgcaaaccggcatgagccacgttcttcgtatgttgttcccgcgagcaccgaacagcatagaagaaattaaaacaacagtacacatcaacagctgcatgggcctgctggcactacaggtgtaacttggagcaaacaggcccactggcattattatattcgtaaaaggaaaaactttggctaggtgaggcaaaccatgcagacatgcagtgttcctccaggtccaggggcgtgtaggtgaggcactcgcaggagagggagagggccgaggggtaccacaagtgacgcacgggcgcggcgccgggatagtgagcaagagccgcttgggaaatatggaagcaagctaggaaaaaaaagaaaaccaagatagtagaaagtttgttgcacacttttttttaacaaagtggctaaaaatagcttcacaaatgagtttagaaaaacagttggagttgctcttaatacgtaatcagaggaagcatatatgtaccatactttggggggggggctggggtgggtttggttgacgacttcgaaccaaaaaggtgtggaacttttgcgtaattataatctcataattcaagaggtagctcaattcatatatgaaacgaaaatgttacccgcgtagaggtctgcccgagtatggcaccaatcaggatatcttatctttaatcttatccaggtacagcccccacccccactcccgccgcccgcgatagcccactccttaagcccttaattaaccctgaagcacctgtccacgctgaccaagttgcgtgagcaataaccaatggccaacactggactggaaacaggcgatcgacagcctgccctgctccaccgggacggcgcaacgcgcggcaaacgcaaaggcggccgccacaggttctggatgatgcggtcgcgatggcgagtctggcacacgaacgttccagcgggcaccgttagtggctatcaccgcctttaaattccgtcgacctcgccgcgcctcctaccgcgacgcggtcagtcacgcaacaaccgccgcctccgcccacgcagctgctctgctctgttccatggacacccagccagccagccaggccatctcatcatcgtctcatttcacacgaccaaggcacccacacagcacgcttgacgcacgccacgcggctggctgcctagcgcgggcataaataaaaaggaatcgtggtcaattagccgatgatcagtttactcgtccacgcagttggcttgttaatagtataataccagcccccccccccctgtttgttgcgagttaggtgatcaccttcgatctcccgcgcttattttgcgcgccgccctgctgccgctctctgcacgtacgtcgtgtcgtatcccaggaggacccggcgcggcgcaaggctccccgctaatcctaccgctccgcagccgccgcagcccgcaggtgcggggtggttgacggccgcttacccgctccggcgccatgcgcacacgctaggtgcatcgaggtcaagccaaacgctgcccaccgcctctgcctcccatataatcctcgtgcacgtccttgctcatcatctcaacacacttcgtctccgatccttccgactcatcgccatccatcaggaccatcaccagtaggcccagaggagatcgtatcagaggagctcgattttccttccgatcaggaccacaccacaccacaccaccgacgtgacgctg

SEQ ID NO: 351 - DNA, 2000 bp, Sorghum bicolor
  source 1..2000: mol_type = genomic DNA
cctgtagctcgttgccatgttgactatttgcatttgcagcacccggtggggtagctcttcttccatcccctgtagggcctgtagtctgtactaggacggagagcgcaggcgcgccggggcgcagggcattcccatgcgccatggccgcataccatagcgcacggtcaaccccaaggagcgcgttgctgttgcaagtgggtgaacggcgcccggggcgcgtcggcgcgcccggccgcggaccgccgcctttttcctcgctgtggacgaggtcaccaagagcctgtgcggtggttacgaccatgcttgcaacggttgttgcacgctgcaaaccggcatgagccacgttcttcgtatgttgttcccgcgagcaccgaacagcatagaagaaattaaaacaacagtacacatcaacagctgcatgggcctgctggcactacaggtgtaacttggagcaaacaggcccactggcattattatattcgtaaaaggaaaaactttggctaggtgaggcaaaccatgcaaacatgcagtgttcctccaggggcgtgtaggtgaggcactcgcaggagagggagagaggggtaccacaatcgacaagtgacgcacgggcgcggcgccgggatagcgagcaagagccgtttgggaaatatggaagcaagctagggaaaaaaagaaaaccaagatagtagaaagtttgttgcactctttttttttaacaaagtggctaaaaatagcttcacaaatgagtttagaaaaacagttggagttgctcttaatacgtaatcagaggaagcatatatgtaccatacttttggggggctgggatgattttggttgacgactttgaacgaaaaagatgtggaacttcctctgattcgttcaagaggtagctcaattcatatatgaatcgaaaatgttacccgcgtagaggtctgcccgagtatggcaccaatcaggatatcttatctttaatcttatccaggtacagcccccacccccactcccgccgcccgcgatagcccactccttaagcccttaattaaccctgaagcacctgtccacgctgaccaagttgcgtgagcaataaccaatggccaacactggactggaaacaggcgatcgacagcctgccctgctccaccgggacggcgcaacgcgcggcaaacgcaaaggcggccgccacaggttctggatgatgcggtcgcgatggcgagtctggcacacgaacgttccagcgggcaccgttagtggctatcaccgcctttaaattccgtcgacctcgccgcgcctcctaccgcgacgcggtcagtcacgcaacaaccgccgcctccgcccacgcagctgctctgctctgttccatggacacccagccagccagccaggccatctcatcatcgtctcatttcacacgaccaaggcacccacacagcacgcttgacgcacgccacgcggctggctgcctagcgcgggcataaataaaaaggaatcgtggtcaattagccgatgatcagtttactcgtccacgcagttggcttgttaatagtataataccccccccccccccccccccccccccctgtttgttgcgagttaggtgatcaccttcgatctcccgcgcttattttgcgcgccaccctgctgccgctctctgcacgtacgtcgtgtcgtatcccaggaggacccggcgcggcgcaaggctccccgctaatcctaccgctccgcagccgccgcagcccgcaggtgcggggtggttgacggccgcttacccgctccggcgccatgcgcacacgctaggtgcatcgaggtcaagccaaacgctgcccaccgcctctgcctcccatataatcctcgtgcacgtccttgctcatcatctcaacacacttcgtctccgatccttccgactcatcgccatccatcaggaccatcaccagtaggcccagaggagctcgattttccttccgatcaggaccacaccacaccacaccaccgacgtgacgctg

SEQ ID NO: 352 - DNA, 2000 bp, Sorghum bicolor
  source 1..2000: mol_type = genomic DNA
actggatcatccagtggggtgtcaattgttgatgattgttgttcctctgagccactaacactaggtcccaaatcacttgatgatctagcactaagtccatcactcctatgtattgttcggtgggtcattccatcttagtacacacgtatttggtgatcgtcaccttgccagatgatccacggcacctctatctttcaatttggtgaatgatatggtgatccttgtttttgatgtgcatcgtgcttctacatcaccagatgatacattggtcctgatcaagtgcttatgatctagcaaggaatcttcatcgtatcttctttgttttaactcgagttttggtcgttcttcttctaaattgatccttagcgtctataaacctatgcagatatgtctaacacatcttgatgactttacactttactacaaatgcatctattgtagtaagcataagtctattgacgatcaaaattggcccgttgcgactttgttggcaaactgactaggtagggttgtcaggccgactatggtatgttttacaaactggctaggtggctaggtcagttttacttttacattacgagtggggatccatgatgagtttgagttgtaaacaatctttagatgtgataagtctatcccatcaaataaatatgaggggggcaatgagcgattgaggatattcaatcaataatatactactccctccatcctagtatagaaggcgtaagcacctttggttcaaagagcaagaacatatttaattctctctctcagcactagtattattgaattaatgtttgtgagagagagcacatcttatattatgagacatggacaaaaagtgattacgctttatatactaggacggagggagtatttttctttttccaaccccgattattattttgcaagctcctcaataatgtttgtgggtgtcctaaatgacctgcagagatcctaggagaaccctatgtgtgtcttacgagtgagctctttctcaagatatgttctctatactatacacgtgctaagcacgttctcgaaaaaaggatgtgttttctaggctttcgtgatttatctagtaaaatcagttaggccaatttatgaagtcggctaggccaagttcactatggttcgtcgtgaggtgatctccatatgatccgtgcgttctagctctttgagtgtgggctcagatttgcgtccacagagcaaaaaattatctcacaatgtagaggctgttatatcagtcaaaccactaaaataaactggacatgaaaagaatgaaatgtgaatcgactctcttaacgtttttttggctatctttgcatttaattttagcctttgtctttcttgtttgataagttggatgggaagtaataggcaacagcagatttctcaccaactatttctaccaggtcgatgttagagcaatgcatggttctagtacatgaaaggtgaaatatttgacgaaatagatttgctaaagtatgggcaacctgctcggtagttcgcactaacaagaaagaaagcgagagttcttgaaggaaacacacacgcactgaattttctatagcaaaaaccactgcccaatacctgcagcgctccttgctttctgttacactcttgaaacaaatggcaccaacccagttagattagtcactaccagcacgttcactgaagtgaggaacattacctatttttgttaggcagaatgggcaagaaggcaagaagtatggacaagagcaacgaattctatttgtccttgatgaattcaaaatcctgcgagactaaacccacacttaaacatgggcgcagaggaaagccactccacacggctcgtgtgcagaggacatatatatacacgagggcgccaaacacatttcccaactcaccaagaacagcgccatttcttaatcgcagcgcctaaacccagccctcctaattatatcgccacagtgctgttacaaccagttgcgattacaagcttaaaacgcaccggc

SEQ ID NO: 353 - DNA, 2000 bp, Sorghum bicolor
  source 1..2000: mol_type = genomic DNA
gtctttttttgcatgtgagtggctgggttgtgtgggtcttttttttacatgtgagtggctgttgtgagtggttgggcgtggttgtgtgggttttttttttctttgcatgtgagcgctgggcgcatgtgactggctggcgtggcgtgtgttctggcttggatggcgtgtgccggaagagcaagcgcggtgactgattggcaattaatttcaatccgccggtagaccacaaggacgcgagccatcgggggtatttccgtccgcacgagccgctgcgacggtagaacgacaagtttcgcgaaaatcacataggagcttagaacgtcaacttttctgggtacggagggagtataatactaaacccctcatttggtattgcttcggctccgacttcatgtggctccttgcaagaaccaaaaggagtcgaagccgttttttactaatgatagagaaaaaaattgacttctcttggctactccttacaaatttaagataagttattataaaactaccactaaaagtgtttttgctaaatatttttttaaacgactttagcttcacaagaggagtcggagttttagccctgccaaagtaatcctaagctaatattgagtttgactatctatataaaaagtatgaatactattatatcaagtaagtatcattcgatttattatgagatatatttcttataatatatttatttaatttataaatattaatatatttatgtatatatttgatcaaactttagatacttaaaaaatgttttagaattgtttttttttacgaaggccgtacgtagcaccttattgcaatttgcttatttacacaagatatacatatagcacctagagctacaagcctattgcaatcgatttatttacgttgcaggtgcttgtatacattgacgattatcgccaagccagtcgttacatgtgcatgcacactcgtccacgtgaatggagacatgcatatcctgtccctttcaacatctatatacggagtcataaattgaagtatcttgagtttgataaagcagccaccactaccaaacaacacttttagacacggtcaaaatcaaattttgaggtttattctcaaacctactactacactatcgatgttaaaaatcaacttgcatccacaaggatgcaaaacccatgatctctcttaccaccacaacatatagtcactgtagatatagtgtctcatgtttattagtttatacaaattttgtattggatattttgacccctaaaggttctcaaatgaaaagttacagctacatagttttaggattcgccgagcactacaactttgatataggatatgtctccattttaggtcatcgaaaaattcaaaaaaaaactgattttcaaaatataagaacttaaaatatatatttgagcccttaaatgatcttgaataacataaagtcctatggggttgtttgctttgctgaaaatatatggcgaaaagtatttttcgcagatttgttgtgagagataaacattgttaaatgactggctgatttgacagttcgtttttagataaacactactaaatggctagctgattcggcaactcgttttgatgaagctgttgcaagaacttcagaagcaaaaaaaaaaaaagaagaaagaaagaaagaaaaataaaaagaaaactatgctaaaggggaggagagaatgggcatgaaaggttaatggaagcaagggtccaaagtaaaccatagaataggggaataaccgtacaagttctggcacgtactatattgtatgatgcagtacactctccttgtataatttaacagttttatttaaaatgtctgctatatcgtgtataaaacgctgtgtgctctgagattgccacagcacaaagcaagctcactcatcacagacgtgaagcaccttatagaggctctcaaaggcacgcgcgcgggcgaaaacgcggagccatcgaggagaagcccaattaagggacggaggctgttcttcatc

SEQ ID NO: 354 - DNA, 2000 bp, Sorghum bicolor; identical to SEQ ID NO: 352
  source 1..2000: mol_type = genomic DNA

SEQ ID NO: 355 - DNA, 2000 bp, Sorghum bicolor
  source 1..2000: mol_type = genomic DNA
cagtaggcagtgtggaactggtcgcttccctccccccaaaagtggaccaaaaatctgcacatggcactcacagggccccattcacctcagcccactaaaacatatgggccacttttcttgtagcccactaaaaatgtgtaaagctaccatcttttgtgaaggctgattgactgaagcatctgtgacgactaggaaggatgtcaccatggccatttccctgttgcagacaagccaacgtcaccagcagaccagtacagtttttgttttttttaagacgaagcaaaccggcacagtagggagcgctggctaaatgacagattactttcgcaaagattcttgagaatgcgagtgatggcaaatatatacatacttttttttggtcattgcttctggcctttgttctcttttgatccagtgtcatattctcgtgcccgaattactttgattgcaaatctgtacgccttttcaccagacacgtgttcatgacacccttgagtttcaatccaacaaaaacctgcaacagtgggcacaaatattaggaaataataccatattcagaaatcatgagacgtgcacaagcagcatgatgggaaagggagaaaagaaacgatgagcaaccttgcgattttcaaattaatttcactcatcaaattcactattacctactgaaaaaaatctaccttcttaattgtaacaatatacctcctcttaatgaaactcgtgtcaaaggacacgttcacgttcacgttctcgagaaaacaaacatgtctaaaatgccaaaaaaaaaaggatcaaaatgcccagaaaagacccaaaagaaccatcctgatatgaaagcaagcctacgtcaccactccatgagtcatcgataacgactgtggggccaaatggcaataatggcttgcttattctgggtatatttcaaaatacttgaaaatcaagcaaattctttgacttatgttccccaagagtagagttcaaaaaatgcttacaggattagtcagcatccatggaaaggttcctaggcatcaaacaccttcagtccaataaaaattgttcatcagctttacaaggagcaagtatgaatgtgactgattccaacacggtttaggagttcagaagatgcaacctgaaggttacatcatcaaataaatgttccctccattctaaactgtaagcattctggcatatataagatccatattcgaaatctgcaacatacaaaacatactgagtaatttgctatccatcaaataaaacgtgtgtgcttactgcattcatttccacaatgcaaacaaattatgtgatgtgttcattccgtgtgaaatcagtatgtatctctttcttagctgcgccttttctgtatgtagcatctcgccttattattctattcttcctttgctttgcggcatcttaatataatagcgagcatgcaggaggaccgcgtgtttgagggaaatataagcatgatgtgttttcttacagactgtcagtggccactggctacgtatatacagctcaaagaatagaataacgaacaggggcaacatatcctgtgcatgagaccatgtatatgtatcgcgtttagtcatcatctaagcagagatcagatcagataacataaacaaactacacgaattgaagcagcaagtctacggtgcacaaagaccaggttcaggaaaaggttggctggctgctgatagagattctaatccaagagaagaaacaacaattagaaagagagaaacccagatcaccaccaccaccgctcaaacagtattttattactatcagagcagccacctttttccatgccaataatacacctctcccttttcgttggcataaacacaccgcgcccagaccgtcatcatgactaaccaagtttaggaggccctaatcagcacttgctccatcccccgcgctcgctcacaagagagagagccccagccagagcagctcagagttagaggtgagaaaggaagaccgaagactacgcc

SEQ ID NO: 356 - DNA, 2000 bp, Sorghum bicolor
  source 1..2000: mol_type = genomic DNA
gctaggggcggaaggtcctgggagcccaagaccaccagcatatgggccaccgaggatgagggcaccatgttggcggggtcgtaggcagtcgatgcgggcagcgagaagtctgtcggaggactgtccgtcggcggctgagccgcaaaagcagcaggaggctcagaacgcgcacgggctgcacggattgcagcgggcgtgcggaggcgtcgagcgacggcgcgtaggatggccttgagcttcatcttgcactaaggacttttgtgcccgtaggcacggcagagcttgcagcggacaggctcgccacatttggcgacaaggtgatccgaagcaaggcagcggaagcagcccctggcgggagcgagaggtttaagcgccctgactaaggcgggttgcggcactaagggagagcaaatagcttcgaggtaggtttgaggcctgggtcgagaagcattgaagacggaaaccaaaggcgtgtccacagctgccacattagctgcgacaagacgtcgcgccgctcccagcgtacccgtcgtaggggtgagaggcatgggggacgtagaaagaagatctacaggtactgtcccaagccggattgcctcgagagccgtcgcaggggtggggtcagtggcagtaaagacgttaggtgaggccagggcatttgcactaacgggctggcggtccgtttgaacggcccgaccgaccgtttgagagagcgggggtaggcgggatgcggtgtccatggctgcggcaagcgcagggtggaagaacaggtgcacgtcggcaataaggaagttcccagcaatgggcagagcatcggcgaacttctgactcgacacgatcaccactaacacaaagtcctagacacgatcaaccctaaggcgactcggacggggcgcgagcatgtgacagagcgagttcgtgacgaaaaacacattgaaacgaggatcacgagaaggaggggttacccagatcggcgccggagccggcgacggggagaggaggttggggacaatgcactcgtggaggtccgagagcaggcggttttggagttcataccgggctggcacaggcttgacgatgatgcccctctgctggggcggcttgtcggcgacaccaagacgacgccgagccgacggcagcggttggagagggcgtgcagggtcggggggtggaggcttagagcgtggggttggcggcggaagtggctgcggtggtggggggggggcggggggcggcggtggcgggaagggtggtgggagcggcgggtcgcccgagcgggagcgctccgggagacgactcattagtgagggagtaagaaaaggttaacagaatctttgttaaacttttttgcccgactcggttaatattaccgtagtagtgttggtggcggccgtgtgcgtgtgtggcatgttatcatcatctctcaacatctaaaaaaatataagcgcatacagtctacccatatatagttgagtcaatatccaattaaaatccatatgtgactaatataacattatactgcacataatatttaatacggaccttatgatttatttgatttattaattgaattgaaatagaccaagcctgttactaaatccaacagatcggacaactgctcgagaggaacagaaaagctagcatcaccagtacgttcggcttctagtaatgagtaggtcgagtactatcatacagtatgtactctttccttcaaacatgtataacattacctatgtgtagctgtgtgtgccgtccctagttctctctgcagtccccatctcctcagctctgtcaacgacaaagagatttgagattgagggaggcagcagaagagagacagcaggaatctcaaagaagcccagtagtgatgcataggtgctgcataccgtgctggtagcatattgctgtgtcctttgtatactctttctagtgcaggaggagggaaaaataagaagcctgaagccataccaggagacctatataggccaacagagtcagac

SEQ ID NO: 357 - DNA, 2000 bp, Sorghum bicolor
  source 1..2000: mol_type = genomic DNA
tgttgtcatgtaactcacaactttaattttgttctagaaattaattaaggaatgagttatatgatacaacttaaaatacaaacattgtacaaatataaaaagaaaaaataccacctagaatagaagagaagagaaaatacccattactggccggttataatgtatagaaatgtattctttgttagttagggcagttctagtgatagaaactaagtagtttatatagtattggactttgtgtcaaagaaactatctatttcagtgcaagatttgtttctagcgtgctcacataaatattggccaattgttgccatgttgatctctctctcatctccggatcgtatgtgcacatatcaaataaaaaccgacaacttggtgtggcaccgtcctcgactccttgccagaatgaacgaactgctggtctctcctcgcgttgcttcccaaaaaatcatctttcttcctctccggaatccaacctccaaattcagaaactaggcaatgcatatcacaccaccccgtcctccatcttgagagctttcaattctgctacagagctctcgctggtttggagtatcagaggagatcgaagaagctcgcactccatgcctgtcgcagctgtttccacgccagtgaggtgccagcccgggcggccgcggcggtgtgagccactcagccaagcgtgcactcacgggaggagagcgtagaagcagtcagcggcgacggcgcactcgatccgcatgaatgctgatagaaactagtcgtttctccccaatggtgtttttgctgtttctttgtgcctcgttcctagtatcgacgtcgttccctgaggaagaagcggtttatttattttgtactctatggtaattaatagacatagaaactatcatcattacatcattggaactgtcctaggtcctataagccataagtcgttgctcgtcgccataattgcctttggcctcggccaataatttaaatgtacacttgaatttgcagtttgcttgcctgaacaaaaatcatgcattgaaccacactgtggcagcggttgactagtactggacacattggcaggatacagcgcatagccttacctgcttgataaatgtttttcttagagatatttgtgtgcaacttgagaatactttagagaagcactatcaaatgcgtgtcaaggccagagggtcgttcaagttgcatggactagccgaccagtcatatagtaacacaggctaattaatagggtggcttgtggctagtacaaaaggttattctttaagaggaaaatgttctttaattttatggtctgtaggagatgtcgtaactatactgagaatatttgcatgaaaaactatttgtgctaattgatgcaaacaataacttccagtggcgtgatataataatggttttaacattgctaattagtcacaagtttagaaggcaaacatggaacaacatgacaaaggaattgcgttataaattaaactggccccaatcatttgaaattaaaatctccaagatagtacagtaggggcgtaagccgagtcagatagtaatgcaactaatacaatcttatgtaggcgcatgtggtccatatagtactatacaaatattgatcacgtcttacagtagtatcatatttcacagtaaaaattatagcaactatatatatatacacccgactcctttaatacgctacttgatacaaaaaatataagtaaaagtaatatagatgtcgtactgatggactgttttgtacgtactgtgaggaaataaaactaattaatgttacacatcaaggtcccttcctatataaataaaacatcgagccatccctggccacaaggctcactggctcagcctgtcagccaagccacgcctcctagagaccgtgctgcgccgccgtaacgccatttccaagccactctctctctttctcgcgcgagagagaggagctcgatcggtggatcgacttcaccgccgcgaggcacgagcagctcgag

SEQ ID NO: 358 - DNA, 2000 bp, Sorghum bicolor
  source 1..2000: mol_type = genomic DNA
tcgttctttagtctcacacgtcaattaaggccttatttagttctcaaaaaaaattgcaattttttttttcaaattcttcattacatcaaattatgtatggagcattaaatataaataaaataaataattaattagacaatttatctgtaatttatgagatgaatcttttaaatttagttagtctatggatagacaatatttatcaaatacaaacgaatatgttataatatttattttgcaataaaatttagaatttaacaaggcctaaacttgtggttaggaacgatgcaggactactgctcgtacggagcagcagatctggtacctaggtgctcgttatttttggggaaaaattaaattataaatgtataaatatttgtaggacagagggagtaaatctgctaggtattttagcagttttttttataataaatcagtaaacactattttctgttatggactatacaaacaaacaaggaggacactggacagtggacacggagcatcgaacggtcagagttcagaccatgacgacagtatcgggtactactctggactcgcagcagtgcctgccggccggttgaggcgcaggaagtgagcagcctgcaggcacttgggccgtgccacggtccccaaacatgcatgcgccaaatatcataccgtgccaagttatttatttatttaagttttattaaatttataaaatatattaataatatctatgatacgaaacaatgagcatcattagaaacttggattaaatatagagttagaattgcatcttttttgtagaactggtgtatacgtactagtacccctcaagtaccaacctttcaatttgactgctcgtattttgcacaaatgtttacgtagtcagccggaaatgcatagcatgccggtgtgcttttgattaaaaaaaaagaatctgctgatattttgtcgctttatttaaccaaacaaacacggtttgtcaaggctcgcagaaagtaaaacccaagttgtcaattactctggaataaaggctagtactctatttgattccgtacactaaaaccatcccgcccttggattactagcatcgtccagacgtgcagtgacaacacattttctattgcaataaggttcacagtcactgccatcttttcctacaacaaaacaaaaaggaatgttacaaatttacaaaggcttgaacactttttttttaaaaaaaaaaaattaaaacttgcctaaacacttttccccttgagacaacactttgtgttcttgtaacaaaaaggaatgtcagtttgattaaacagactaaatgggctttagccaaagtcaccaaattaaatgagcctaaatctcacattttagttaatttggaaccaaacaccatgtctcttttagtctcttttcgccaccaaaaacactaaacaagttcgtaacgttgcagctctttgcctttaggtgttttgtggagtccagtcccgtcccgtcccgtcccgtgcgtgacactgtacgtacatactcctggtgggtgaatcctgaaaccctgatcgccctgcacggctgcacctgcaagagccgtttgtgaaactgaaaccggcagaaaacaggcccggcaagcagacagagacaggggaaggcgaatccatttcgaaacgggaaacaacgctgcgagatcggccagtccacacgtcttttttccccgacacgccctccccggcccagactcgctctgcacgtacgactgcatcttttgatcttagttagtccataattgaataatatttgtcacaaacaaatttttcagttttcggaactaaacaaggccctagtagagaaaacaggggctgggaccgacggatggatgctccaacgaacgcaggacaggtacaagtacaggctgcaccacaactgccagtcgcgcgcaggcctcctctagtcttcttgccggccggctgcttgtgctagcagtagcagataggaggagtggccggggtgcccgggtgtcgccc

SEQ ID NO: 359 - DNA, 2000 bp, Sorghum bicolor
  source 1..2000: mol_type = genomic DNA
gacatgcgtcatttaggttttaattattgttccaagcacacatccatgcaatggttcggttctttcaaagtccaaacctttgaaagatgtcggaacagtatggtagtcaaacccagaaaagctgtatagtatgcgctggaaacctgcacagcacagcgcaacttcttccggacttgttctcgattcgttgcataaccgaaatgttttttttaaaaaaaatgcaggtagcagccgtatgcgttgtctttggccctgtgtgaactactatgagtctatgattgccatttccgtttgctccgaccctttgtccacagtcttcgccagcgcaaaaaggtcaaggtgcatgcatgccctttggctactgtttatttactcctatatattggaccttgagtgcacagatttactccttgttagagatgaaaaggggtcaaacgggttggtgtatagtgttgtaacggcgacgcgaagcagatgcagattgccccggcaggtagcgcacaatcttgtgagtcaccacgcttgaccccccggccgcctctgctgccgcatgcaaacggatcgaatcgatgaaacaagatggtccattcccctagccggccggctagcttagccgaaaggaaaggcgtccaaagaattcatatggccatgccctgctcgtgttctttctttaacttatttatcccgtgtggcgcggtatccgcatgggtgcgtgcagcgcaggtttgacaagcgtgaagcgtgcacatcgcatggcacacaggtttggaaacacaatacctatgaactgcttccgtcgactgaggcctagcttgtttaaatgcacctaaaagtttaaaagtttacaagattctccattacatcgaatctttgaacggagcattaaatatagataaaaaaataactaattatacagtttatatataaatcacgagatgaatcttttgagtctgattagtctatgattggacaatgtttatcaaatactaacgaaaatgctacagtatcaattttttttaaaaaaaactttgcatctacacgttcacaaaaaatttcccagcatatcatcgcgattgtgaaacgcatgtctgccggtgaaagaagtgcgtcatcaactcgtcatccgtgtcttgatcaagttcgttcgatccggtctctgaaactgagcccaatcggtgtaaaggaaaaggtgaaggaagtttatataagcagtagtagccacacggtttcaaaggatcctacgtaagtacaaccgggaaacaaaacgcatttggcacgaaacgcacgtccgggaccggagacgagctgcctgcaccgcaccttcccagaccattttttttttctagtctatctactagtgcgggggaaaacacataaaattgacgctcgtcaccgcgtgcctgcagactgaagagggggtagtacaaaactaagcgcaacttgtacacctgtgcccaagtacaaccagacggattgactaaaaactcacgagtagtaaaacatacagtgctggtcaacacaggagtattatagaagcaaaaaaaaacatatgtttttttttttcaaaacaaacggccacggcgccatacgtacgcgcgacagggacgaacaacaataatacggtcggacggggcccgggacggctcccgcagcgcaaaatggtcgcacctggcccacgcccactatcccccccaggccccaggccccgaacgcacctggacctggtggtgctggtggccttcaaggtcaaggctgccgctataaaacgcgctgcgctccccgcagctgcagcctcgatcgcttgctggccttgttgcgatcgagtaattgcctgcccatcttcttctgccagaagaaacacacgcccggccgcccccacggtccggccggccggctgctgccgcacagaaactcacaccgccgccgcctgccaccacccagttcgaccggagtcagagcgggaacatacacagactgagaattctgttggatcgagcagc

SEQ ID NO: 360 - DNA, 2000 bp, Sorghum bicolor
  source 1..2000: mol_type = genomic DNA
aattaaattataaatgtagaattaaatacattgtgtatatagctaatctagttataattatctagttctatagttcaatttgataggtagttaggtagttaggcaatgtagttagtaaatttattttatataggcagacaacaaatttagatatatatttagttaggttattatatgatgtagtttggcaatgtatttggactgtatgcattttgcttattttgaatgtctgtagattttgatattatgcagtgcttttatgaagggcaagaatctgagagggagaaggaacaaatgagagtaggttcggcagtaaaatttggtcatggtttctgaatttaagctcggcgctaggatccatggctccgaggtcggagccacaaatctcggctccgaggtcggcgccaagatctgtggctccaacctcggagcctagatctatggctccaaggtaccagccacgttaatgctacctaggatgccttgttgtgcatggtcaggcaccttagagctaagatttgtggcgccgagatgcgttaccttggagccatgagttctaatgccgactccagagtccaaagataagtttatgtcacttaaggagttaaacataaatttatttcaaaaaaagccaaattgtaaaaaaataaggaaaagtgaaagaccagttcagtctttgaaactagaaataacgacgtgtagtaccgtttcttctccttcgtcccttccttctggaagatgtagaagtagtatgccaaataataatgactctctgagcctgtgttgtagacctctgacgagaagataagcaagaatcaccatgtcaacaatgtgcatgcatcctgctcctgcacgtatagattcattcgttcatataagtgcatgatgccaaagggtgcctggctaaacttgtgaggtggcctccgtcgcacttctcaactcctgaattcaacttctggtggagcaaatttcagactgggatttaaaaaaaaatcctttttatctatccctatggtcaaaacacgcagctcaaaaagtctggcctaatactcacggtctgcaagtcgagttttttatgagtacatgattaatggtcgttgctgcagaaaattgtccgatttaatttgcttgtttgaactagtgtttgggtaaataattaattacaatagcactaatccaaaactcgattttagcgacaaacatgagctgacgcggttgctcctacgagtggacaaacgtactgcattcggatcagatcacatctctccttgttggtacggagatcatgattgtcaaccaaaaccaagccgaaatggattgtttgatcctcacccaaaatatgcagtgcagctatgcgccggttgttgcgcagtacatatcaacgactagttttaattagtggagtctactaataagaatacatacaagaagagtgcatacattcgcgtacttatcttgttgatcacatcacacaagcaagcgctagcttgtggacattggcacaaactaaaatataatgcgatcgaattaattcccacgaaacacacaacacgacaattaatctattagctgcttggcagctgaactctttatttccctagttttttcttggcatataaacgtatagatgtcgtcgacgacgactagacgatcgagacgcagtttctatgcacgcttggtcaactggttcagcgcgggttctgctcgttggcgcgatataatcccccgggagacgcgaccaaacctctccagtaatcccgttccctgctctctctccttcctcctctgcattctgtgattctctgtcgcctccggtggcctcccctctcccactcgctcatccacatccaccataaatagctagctagctagtgccggccggcgccggtgcaggtgaagaaggtagcacgcgcggcgggagatagctagctaaactaggaaattaaagggccgccggccggcgggacgatagatcgtcaggacaggacgagaagagatcg

SEQ ID NO: 361 - DNA, 2000 bp, Sorghum bicolor
  source 1..2000: mol_type = genomic DNA
aaaaagggaagcttttcgctgcacagagcctgcaggatcgatccattgtcatggatgttaggctaggactgaattgaaagtctctgaaggcacatatatatgatcccggcatactcaggggagctgcattcacatgcagcaatgcacgcagacgcagtgaaaaaaaaatgaggtgttcaaccggctggcatcgtcgatggcggatttgatgtcacgacgatcgataaacttttgtggaaaaggtaggcagggcagcggtataggaaagaaaaaaggcagcatatatatatgccgcggcgctgttcaaagggttttgtgtcacacgccaaacaatccggggatcggctgcggatccaggctctgctttgcatcgtcttgttcctttcataccatcagtcatcagatgcggtggatactactgtatccatatcagccatggttatctatccatggatttctacttctgcacatgctgtcgatcagttagctgagctgctgaggttattcagaggcatagttaaacgaagtcctgccatatatatagtactagtagaatattactcctactacaaacgatgagaatatgctaccagatactctgttcagcatcagccgacactattttttttttaaaaaaatatacaattctcatttttccaagagacaaaaaattaggtcttgtttagttcaccccaaaaaccaaaaacttttcaagatttcccgtcacatcgaatcttatggcatatatatgaaacattaaatataaacgaaaataaaaattaatcgtatagtttacctgtaaatcacgagatgaatcttttgagcctatttagtcgattggacaataattgtcaaataaattaaaacgaaagtgctacagtatcaaaaccaaaaaaatcgcaactaaacaagaccttagtataagttaaaccatatttatacgaaaaaatatcgttagatcaataatgaattggtcttgttcgcttaaatttacctgccgaatctaccagtcattcaacaatatttttctctcacaataaattagcaaacagtatttgcatagcttttcagacaaacgagcggctaaacctattttgaccgaaatgttcaaactgaacaaatctatcatattattttcggagggagctagggtgtagctagtagggatgaaaacggtacggatattttccgaccgaattcgtttagagaggtttagatctgttcatatccgagtctgaatatttaacatccgatactgtatccgtatccgaatatttaaatcgtatatttatgatgtcgatatacaattgtatcttatccgacatgattgacattatccgtattcgaatccgaatccgaccacaaatatgaaaataaatatgatatcggtgatttccatccgtatccgatccgttttcattgctagtagctagtaacactacacgctctttttcgcaaacagaagatcccggcgagtgcatgggaactaggccgcttagtgagatggatcgatcctctctcctccgttgtagaccgaaagaacaatgatatggttggacttggagtgtggtgtggtgtggagcctgccaaccgtctcatctgtcatcacaaggcaaaaaaaggcatcagatcactcccgtatttttctcgcggtgtactccggtggtcgcccggcgtgccctcctcccccgccccccgcggctataaagctcggcgccaccttcctggcctcttccggactcgcaccccggcctccatcgggcatcggccatgaccacctgcacctgctgcctgcctagctacacacctcgctggctcgctccatatatccgcctgcctgcttcttgactcatctatcagagtccttcttgctccgacgatcgatctcctgtacctagctagtgatcgagggagctagaagctagacgatcgaggttattgacttgagatccagctgctcgctgaagaagaagctgacgacgcaacccgccgccgcagcc

SEQ ID NO: 362 - DNA, 2000 bp, Sorghum bicolor
  source 1..2000: mol_type = genomic DNA
ctatattattgctttatacatgtgtcataaacttttagattttaggtgaaactaaacaaggtcattagttgctagttgctgcatgggctttacaagtcggccgtccacggacgacggcgaaaagtatttgaggaggccagggatttcaggggctgctacctacctgcctgcctgcctactaatacaccggccagcacatgccgattcctcacgccggccggttagagttttggcgtaacaagtttccgacctttgaaatcacaccgcgcgaaaatttcagttgagctactggtttagtttcagacgaatgaaaaaggtcactggtaatggatatatacctcttattggaccaaaactctacatggttcactttgaatacatattctgcaaaatctttaatgttatattaattgtaagcctagcaagatcattatatttggaactagttagtacaccatggagttctataaaaaaagcactactccttcccatttcaagttataagacattttagctttttaaatacgtagcttttgctatatatgcactaaaatatacgctacatcagatatataataaaaataatgtatctagaaaattttaaatatcttatgatttatgttagaatcagatacatctagttatgtgcagcagccctcagtgcgagtatgaaataagcttgcaccgtattaaaaacgacgtagtcgaatcacgtagaaaatcctagagatgatattgaagcaattgcgataagatattagtatttgccaacgtcgaccataaattctataagcacaactccaaaagagtatgtgcaagtgattattgctctatcacacccctacttgatcctctaggacccactgattatgatcctatacaagaatttagcgcgatagaactgtctagcttaatcatcttgagctctcctaattgctcataatggatcggccccttgtgttggtttggttgatgccaatggttacctcttgtttatatagtccccttgaggctcccatacatgtaagtaggagtcattctaactccagtcttattagaactagaagtcctaataacacacgtctattgagtcctactacaagtagaatttgatgaatcaccatacaataatttgaaatagaggagtacttcttttactctagttccaataatgtgctctcaaatgggaacactacacatatgcataactagactgtcagacgctatccaccacacattgcctttttgcatctagatacatatgagatatgctatctatcaaatcatatcatatatagggaaaaaagtctaataccaaagataggtgtcactgacaactacccatcatgtgccatgcatctacttactaataatctcaccagacttaacatgtatgcaaattcttgtgagagacgacaccaccacatttagcccaagtacacactgactccagtgattcactaatcactatacggccggatgccatccggtgccaggctacctgcaaacaaacacgcgcaagcttgggcgattccatgtgcaactgtactttgtttacagaaaagacagggctgtggtggggtaaggcaatgctaggctctcctattatcaaagtagccaacctttttccctctggtgctgagatttgtaggggccaaccatcaagcaggaggtgattgcaaccaaacacacatactatcccacacattgacttctctgcatctctgtgcagctcatcagcctgactgtctctctcatcagtcttatatgttttttgtgctctctttgttgccttgtgctgtctcctctttctctggctccttgctttctgtgcctctcaacaaagggcagtgttccttgctagtatgtcatctagctagatagcagacacagagcaaagctgcctgggcaggcagctagaaaattagcaaaaaggttaggaagcagtggggtttggtagctaggtgttgcttttagccacatcgctttgctgcatcctc

SEQ ID NO: 363 - DNA, 2000 bp, Sorghum bicolor
  source 1..2000: mol_type = genomic DNA
tgatcctcattaccaactattatttaccacatttccataaaatggtttggaatgccgaaatttcataggattcctgcaggactctgaaattctgatagacttttcagaattctacattcttatatatttttgacaggcccttgcgcacgacatggaattattggcatgacaaagaatatgtgttttctaaaaaaggggggtggggggggggggagtatatgtgtagactagtatatatgatctcacacgcggctctggggatgaacaagtcctgagggtcaaaacagatgacaccatgcattcaggatgctgctacattgtcagttacaactgcccatggacttttggcaggtcagcctagctagcactagcatttgtttggtgatgaatctccttccgatccgcatggcatggtccaccatgagttagggttcatagcagtacagccataactgaatggaaggacttgcatgcgttggactcgtcattctgaccgtgttacgtacgctagctgtacgcatgtacgctgcatcgtaggagtacgcttgctgtcaaagtactgctacgtgaattattggtgatgccattctcttaccaatttgagaggaaccttgatgacgttgtatggagacttaatttccatgcacggtactacagtccgaaatattgacaggccatttgagcgtgatgagggtgttgactgatgactactggcaatggaaactgatagtagtatttggaatatcactgtagtatcttgcatgatggccaaattgggagctacttatgttagaattatagctgttgtttcctgattattgctcaacacattttccttcttatctaaaggtatagtgttgaaatatgattatgttgtgtgttgcttgaaatgaaaaggaagcatgtcttattttcattttaggtggggggataggggcatccagagttttagaactagctgggtttcaggctttcagcaaagatcagctggttacttttaaaatttaaaatctaaattttttccaaggatctggattggatcatatggggaaaaaaatcaaagcagagttgggtcagatattatttacctctgctttgagccctatctgagtcgaatgattaacccatgtcaatgcccttgatgcttatcccatcagtaccggtgattctaatagctagatgaagacaagaagtaacattggagatcgcactgccttcttatccattgacatgttccattgattcagtaaaggctccattcttagatagatcctaaatggctaaatcctactcaagtttaactaagttcacagtagttggctcagtttcaacataccgtacaggtggcgtcctagcttcgtcgactacatgacacaccagtcactgccctagttctagcataagctgctccctatgcattggtcatcaagctatggtaaattgcagagtactaactgttcatcgtggctcgtgcattcctcacctgtcctaaatcctagttacatatgctagaattctttaaaaaagaaataaataattgcattgaacactagtataactaaggataatatattcatttgaagtgttttggaaaaaagtgttgctgagacacccatccatgtttcagaaagcaggatgcatgacacagaagttgatgagaaatactacacctttctgatgttctgtttatgcagcatagcagaggaatactataccatatagtccatagggtggccaaggaaacaaaaagcaatctccaaagtacaccgaaacaaaagcttgtgttgtgtcagcatcaaggtcaaaccatatccgtacttttttaagccctctcgccagctcctataaatcctgggcgcagctagctcataccaccaccccacgaccaaaccagcagcgcagcaccaacacacctgcctgcctgctcatacacacacacacacacgcacacacaggttgggaaagacacagaggttcatcagaactagagatcgagagag

SEQ ID NO: 364 - DNA, 2000 bp, Sorghum bicolor
  source 1..2000: mol_type = genomic DNA
gaagtgatatgattggctaagaatgaagagagaatgaatgtgattggatataaaaatattctatagaaactatccattaggactatagtttctatatatatagtgtctataaaatttaatgagtattaaaactatatatatagtttctagcattgggagtgcccttacaaatgggtggaaatataccctcaagttgcatatatgtcgcgaaaagtcgccgtgaaatgatgcatcagagctgtccaaatcctgcaagccataaatatgatcagtctttttccttttgttcgaggagtcatgaacagtagaatgccacacagtgtattgaccaaacaagacaagagataagacccttccgtccacgaccgcaaggaacaatgaccgccactcaaatctgtgtgcaatgacaaaaactgccttctggtccctgaaagtactatacaaaacccttcaagggatttatgcgtcttcaaggatgtgtatgactggtacctatcgtttgaatggaagctacatttcaggcacctaaaatatagtgcatgcctcaagacacaataatgttgtattggtgtatcaagtatggtaccggctcttctttgatgttgacgcccaggctatcctaagcatgccggtgagaggtgtaggaactgattcacgggcatctgtccgttcggcatacaggctactcttcgatgagcagtggcagcaacaggaagctgcacaagcatcctcatctggtgacactacgtggtccctaatttggaaattatgtgtgtcgccaaaagtccgtgtcttctggtagcgcgtggttaatgactttttcccgaccaaagacatcctgaatcacagacacatagagcctattgcaaactgtgatgtttgtggtgatgataaagagtcagtgaagcacatcctattagaatgcacaatagcaaagtttttctggacgaagagcttatctggtgtcaaaatcccgcctttgcacccacttacctgggctcgggatttgattgatccaggatgtgttcctccaaaagatgcagcggtgatcttatgtggaatgtgggcattatgaatggcgcgaaacagcaggcgttatggtgaggagccgcgaccagtgaaagtagcagcacaataggctatagacaccgcctttgatctctggcaggtgcttcatccggtgaaagaaagacaatctgcaagtaagctgaagttctaggaacggccggctgttggctgggtaaaatgcaatattgatgcagccttctacgacggcacccggtcagcggcttctggcgcaattcttcgtgaccaagatggaaggacgacgtgtggtggcacagctaaatggtatgaatattgtctgaatgtgttggctgctgaggccttagccttttgtgacggaatgactctggctcggcacaggggtgtgcaatgcctgattcttgagaccgatttgtcaggtgcttgttagcttatgggagaaccgttcgcaccagcgctctgagatttcagcccttctcacacagacggaggattttagtccgaactttgaataatttagtttccattttattagcagaaattgtaatatgttagtacatgcttgtactcgtttggtatgctgtgattctcaagtggcggagtggccgttaaccccacctgatctcatggatatcataaatcgtgattgtaattgtatcattgattaacgaagctccggtttcccttaaaaaaagtatggtaccggcagtgagcttgcacacaatgttttgcatttccacacgttgcatgacggcgaatatattattagttcacaaagaaagggcgaaatagtcggcatacacacacacacgaaagcgatggttcagtcaaactccatccgcaggtattccttgatgaaacatctattctagtagtttatatatatgtatatatacacatctccacccttgcaagttttctgtcctagctagctgcaggcgcagcaggaattaata

SEQ ID NO: 365 - DNA, 2000 bp, Sorghum bicolor
  source 1..2000: mol_type = genomic DNA
ctcaagcacgaggcggatgttgttgtcgagcacctcgagcgccgtgaggatgggcgggaggccctcatcgaagcgcacgtcgacgacggcgccgatcacctggcacacctggccgatggccccggcgccggtgaactcgtcggtgatcttgccgcccccggtcttcccggtggccggcgccgacgcggcgggcgccgcctgggccgcggcggaggaggcgtaggcggcggcgcggttgaagaggtacccggccggggacgggcggtgaggcggggcacgcgggcgcggcgccgcgggcgatgcggcccggaggcgggagacggagcggaggagcgaggaggcgacccggcgagacgccatggccggtccggatctagggttagacttccgggggggtctccctgggttgcggcggctccgcgagagagggggggagagaggactgaggcctggccgtggtggggggggggaataagtgggtggagatctcggagacggatcggcgagtggacctcgtctacgggcaccgcgaagcgtgggggagcagccagtgcttcggtcgcatcgctcgcggggaggtctggtgcatgggctcggtccagtgagcgagtgagagcgcgggttgggcgtttcgaggatgaatttgttgcttggttttgcagcggctggaatatattctgttcatttcccttcattatttttgctggtctggcattttagaatctaacaacaaacaactatgagttcttaatcacaattagtcgttgcaactttttgtccaccgaagtggcatattttctatcctcgatagcaatgttttttacaggttctttccattgttttatgtcagtttgtcgaagttctgaagcgactcttatttatacgtgcattgggccggacagcccgtcaactgggtgtaagtaaggccgttttgcggtggcccgtggtgatacagggacaggatcacgcgagcccagcccgctcgccttccatccctgccattgccggccggcctctcccagcccggccttcggcgcgcgcgcgccggcggtgctgatccagcattgccgtcgacaagaggctcgtttctttctgcacccgtacatggtgtgctgtgtgtgcagcgtgtgccatgcgtatgcgaggatgaaatggcgccacagaatgcaagcaaagttccccgggccacctagaacaatgcttgacttgcgtttgcctctctcgcgccatcatacttctcgctcatgcagtcatggtcaatggttttggcagccataagcgtgcttacggcacgcagtatcggctcgtcttattcgtttgactgataagccacaaggcgagctttggctaaaatctcgaccgagaaagagaactcctgcggccctgcgcgttcatcttgtcatcaagttgttcttccgcttgcgtttggaagcacgcgcagcggaatcaaaaagccggaagagtttccacatagtacacacatacttttagtagcaccccagaaacggtaacgataattagcagcagaaacaaagtgatgactgtccacggttgcccttgcgcccccaagccccaaggttaaaaatgccttcggcgatcgaaatcgccggccggtcgaggattcctcgtttttgttggtcaaaagaaccaactcctactctatttactttactctaggtgacaatcggagaaacggaagccatcatgccgcccgtacggccacgaacggaacgggacgagctcacggcggctgctggtgctgggccgtacccgcgggccccgcgcccgcgcagacctgcctgacttccccgtcagccgagtcgctataaaatccgtcgccgagcagcgcatcatcacccgctgctcgtgcccgtctcgtacttgcgctctgcgttctgcgcgcccccgtacatggtcagaacgagactgtcagaggccgcccatcgcagtgcagtgctgagctgaaatcggctggtgtggtgtgcccgcgcgcggcggac

SEQ ID NO: 366 - DNA, 2000 bp, Sorghum bicolor
  source 1..2000: mol_type = genomic DNA
gtagagcagtaggcagtgtggaactggtcgcttccctccccccaaaagtggaccaaaaatctgcacatggcactcacagggccccattcacctcagcccactaaaacatatgggccacttttcttgtagcccactaaaaatgtgtaaagctaccatcttttgtgaaggctgattgactgaagcatctgtgacgactaggaaggatgtcaccatggccatttccctgttgcagacaagccaacgtcaccagcagaccagtacagtttttgtttttttttaagacgaagcaaaccggcacagtagggagcgctggctaaatgacagattactttcgcaaagattcttgagaatgcgagtgatggcaaatatatacatacttttttttggtcattgcttctggcctttgttctcttttgatccagtgtcatattctcgtgcccgaattactttgattgcaaatctgtacgccttttcaccagacacgtgttcatgacacccttgagtttcaatccaacaaaaacctgcaacagtgggcacaaatattaggaaataataccatattcagaaatcatgagacgtgcacaagcagcatgatgggaaagggagaaaagaaacgatgagcaaccttgcgattttcaaattaatttcactcatcaaattcactattacctactgaaaaaaatctaccttcttaattgtaacaatatacctcctcttaatgaaactcgtgtcaaaggacacgttcacgttctcgagaaaacaaacatgtctaaaatgccaaaaaaaaaggatcaaaatgcccagaaaagacccaaaagaaccatcctgatatgaaagcaagcctacgtcaccactccatgagtcatcgataacgactgtggggccaaatggcaataatggcttgcttattctgggtatatttcaaaatacttgaaaatcaagcaaattctttgacttatgttccccaagagtagagttcaaaaaatgcttacaggattagtcagcatccatggaaaggttcctaggcatcaaacaccttcagtccaataaaaattgttcatcagctttacaaggagcaagtatgaatgtgactgattccaacacggtttaggagttcagaagatgcaacctgaaggttacatcatcaaataaatgttccctccattctaaactgtaagcattctggcatatataagatccatattcgaaatctgcaacatacaaaacatactgagtaatttgctatccatcaaataaaacgtgtgtgcttactgcattcatttccacaatgcaaacaaattatgtgatgtgttcattccgtgtgaaatcagtatgtatctctttcttagctgcgccttttctgtatgtagcatctcgccttattattctattcttcctttgctttgcggcatcttaatataatagcgagcatgcaggaggaccgcgtgtttgagggaaatataagcatgatgtgttttcttacagactgtcagtggccactggctacgtatatacagctcaaagaatagaataatgaacaggtgcaacatatcctgtgcatgagaccatgtatatgtatcgcgtttagtcatcatctaagcagagatcagatcagataacataaacaaactacacgaattgaagcagcaagtctacggtgcacaaagaccaggttcaggaaaaggttggctggctgctgatagagattctaatccaagagaagaaacaacaattagaaagagagaaacccagatcaccaccaccaccgctcaaacagtattttattactatcagagcagccacctttttccatgccaataatacacctctcccttttcgttggcataaacacaccgcgcccagaccgtcatcatgactaaccaagtttaggaggccctaatcagcacttgctccatcccccgcgctcgctcacaagagagagagccccagccagagcagctcagagttagaggtgagaaaggaagaccgaagactacgcc

SEQ ID NO: 367 - DNA, 2000 bp, Sorghum bicolor
  source 1..2000: mol_type = genomic DNA
tgctgcagcgctaggggcggaaggtcctgggagcccaagaccaccagcatatgggccaccgaggatgagggcaccatgttggcggggtcgtaggcagtcgatgcgggcagcgagaagtctgtcggaggactgtccgtcggcggctgagccgcaaaagcagcaggaggctcagaacgcgcacgggctgcacggattgcagcgggcgtgcggaggcgtcgagcgacggcgcgtaggatggccttgagcttcatcttgcactaaggacttttgtgcccgtaggcacggcagagcttgcagcggacaggctcgccacatttggcgacaaggtgatccgaagcaaggcagcggaagcagcccctggcgggagcgagaggtttaagcgccctgactaaggcgggttgcggcactaagggggagcaaatagcttcgaggtaggtttgaggcctgggtcgagaagcattgaagacggaaaccaaaggcgtgtccacagctgccgcattagctgcgacaagacgtcgcgccgctcccagcgtacccgtcgtaggggtgagaggcatgggggacgcagaaagaagatctacaggtactgtcccaagccggattgcctcgagagccgtcgcaggggtggggtcagtggcagtaaagacgttaggtgaggccagggcatttgcactaacgggctggcggtccgtttgaacggcccgaccgaccgtttgagagagcgggggtaggcgggatgcggtgtccatggctgcggcaagcgcagggtggaagaacaggtgcacgtcggcaataaggaagttcccagcaatgggcagagcatcggcgaacttctgactcgacacgatcaccactaacacaaagtcctagacacgatcaaccctaaggcgactcagacggggcgcgagcatgtgacagagcgagttcgtgacgaaaaacacattgaaacgaggatcacgagaaggaggggttacccagatcggcgccggagccggcgacggggagaggaggttggggacaatgcactcgtggaggtccgagagcaggcggttttggagttcataccgggctggcacaggcttgacgatgatgcccctctgctggggcggcttgtcggcgacaccaagacgacgccgagccgacggcagcggttggagagggcgtgcagggtcggggggtggaggcttagagcgtggggttggcggcggaagtggctgcggcggtggggggggcggcggtggcgggaagggtggtgggagcggcgggtcgcccgagcgggagggctccgggagacgactcattagtgagggagtaagaaaaggttaacagaatcttcgttaaacttttttgcccgactcggttaatattaccgtagtagtgttggtggcggccgtgtgcgtgtgtggcatgttatcatcatctctcaacatctaaaaaaatataagcgcatacagtctacccatatatagttgagtcaatatccaattaaaatccatatgtgactaatataacattatactgcacataatatttaatacggaccttatgatttatttgatttattaattgaattgaaatagaccaagcctgttactaaatccaacagatcggacaactgctcgagaggaacagaaaagctagcatcaccagtacgttcggcttctagtaatgagtaggtcgagtactatcatacagtatgtactctttccttcaaacatgtataacattacctatgtgtagctgtgtgtgccgtccctagttctctctgcagtccccatctcctcagctctgtcaacgacaaagagatttgagattgagggaggcagcagaagagagacagcaggaatctcaaagaagcccagtagtgatgcataggtgctgcatgccgtgctggtagcatattgctgtgtcctttgtatactctttctagtgcaggaggagggaaaaataagaagcctgaagccataccaggagacctatataggccaacagagtcagac

SEQ ID NO: 368 - DNA, 2000 bp, Sorghum bicolor; identical to SEQ ID NO: 357
  source 1..2000: mol_type = genomic DNA

SEQ ID NO: 369 - DNA, 2000 bp, Sorghum bicolor; identical to SEQ ID NO: 358
  source 1..2000: mol_type = genomic DNA

SEQ ID NO: 370 - DNA, 2000 bp, Sorghum bicolor
  source 1..2000: mol_type = genomic DNA
attattgttccaagcacacatccatgcaatggttcggttctttcaaagtccaaacctttgaaagatgtcggaacagtatggtagtcaaacccagaaaagctgtatagtatgcgctggaaccctgcacagcacagcgcaacttcttccggacttgttctcgattcgttgcataaccgaaatgttttttttttaaaaaaaatgcaggtagcagccgtatgcgttgtctttggccctgtgtgaactactatgagtctatgattgccatttccgtttgctccgaccctttgtccacagtcttcgccagcgcaaaaaggtcaaggactcaaggtgcatgcatgccccttggctactgttttacttaatttactcctattgaacctggagtagtcgagtgcacacagactcactccttgttggagatgaacagtcaaacgggttggtgtggtgttgtaacggcgacgcgaagcagatgcagattgccccggcaggtagcgcacaatcttgtgagtcaccacgcttgaccccccggccgcctctgctgccgcatgcaaacggatcgaatcgatgaaacaagatggtccattcccctagccggccggctagcttagccgaaaggaaaggcgtccaaagaattcatatggccatgccctgctcgtgttctttctttaacttatttatcccgtgtggcgcggtatccgcatgggtgcgtgcagcgcaggtttgacaagcgtgaagcgtgcacatcgcatggcacacaggtttggaaacacaatacctatgaactgcttccgtcgactgaggccttgtttaaatgcacctaaaagtttaaaagtttacaagattctccattacatcgaatctttaaacacatgtatggagtattaaatatagataaaaaaataactaattatacagtttatatataaatcacgagatgaattttttgagtctgattagtctatgattggacaatgtttatcaaatacaaacgaaaatgctacagtatcaaattttttttaaaaaaactttgcatctacacgttcacaaaaaatttcccatgcatatcatcgcgattgtgaaacgcatgtctgccggtgaaagaagtgcgtcatcaactcgtcatccgtgtcttgatcaagttcgttcgatccggtctctgaaactgagcccaatcggtgtaaaggaaaaggtgaaggaagtttatatatgcagtagtagccacacggtttcaaaggatcctacgtaagtacaaccgggaaacaaaacgcatttggcacgaaacgcacgtccgggaccggagacgagctgcctgcaccgcaccttcccagaccattttttttttctagtctatctactagtgcgggggaaaacacataaaattgacgctcgtcaccgcgtgcctgcagactgaagagggggtagtacaaaactaagcgcaacttgtacacctgtgcccaagtacaaccagacggattgactaaaaactcacgagtagtaaaacatacagtgctggtcaacacaggagtattatagaagcaaaaaaaaaacatatgttttttttttcaaaacaaacggccacggcgccatacgtacgcgcgacagggacgaacaacaataatacggtcggacggggcccgggacggctcccgcagcgcaaaatggtcgcacctggcccacgcccactatcccccccaggccccaggccccgaacgcacctggacctggtggtgctggtggccttcaaggtcaaggctgccgctataaaacgcgctgcgctccccgcagctgcagcctcgatcgcttgctggccttgttgcgatcgagtaattgcctgcccatcttcttctgccagaagaaacacacgcccggccgcccccacggtccggccggccggctgctgccgcacagaaactcacaccgccgccgcctgccaccacccagttcgaccggagtcagagcgggaacatacacagactgagaattctgttggatcgagcagc

SEQ ID NO: 371 - DNA, 2000 bp, Sorghum bicolor
  source 1..2000: mol_type = genomic DNA
tacaaaattaaattataaatgtagaattaaatacattgtgtatatagctaatctagttataattatctagttctatagttcaatttgataggtagttaggtagttaggcaatgtagttagtaaatttattttatataggcagacaacaaatttagatatatatttagttaggttattatatgatgtagtttggcaatgtatttggactgtatgcattttgcttattttgaatgtctgtagattttgatattatgcagtgcttttatgaagggcaagaatctgagagggagaaggaacaaatgagagtaggttcggcagtaaaatttggtcatggtttctgaatttaagctcggcgctaggatccatggctccgaggtcggagccacaaatctcggctccgaggtcggcgccaagatctgtggctccaacctcggagcctagatctatggctccaaggtaccagccacgttaatgctacctaggatgccttgttgtgcatggtcaggcaccttagagctaagatttgtggcgccgagatgcgttaccttggagccatgagttctaatgccgactccagggtccaaagataagtttatgtcacttaaggagttaaacataaatttatttcaaaaaaagccaaattgtaaaaaaataaggaaaagtgaaagaccagttcagtctttgaaactagaaataacgacgtagtaccgtttcttctccttcgtcccttccttctggaagatgtagaagtagtatgccaaataataatgactctctgagcctgtgttgtagacctctgacgagaagataagcaagaatcaccatgtcaacaatgtgcatgcatcctgctcctgcacgtatagattcattcgttcatataagtgcatgatgccaaagggtgcctggctaaacttgtgaggtggcctccgtcgcacttctcaactcctgaattcaacttctggtggagcaaatttcagactgggatttaaaaaaaaaatcctttttatctatccctatggtcaaaacacgcagctcaaaaagtctggcctaatactcacggtctgcaagtcgagttttttatgagtacatgattaatggtcgttgctgcagaaaattgtccgatttaatttgcttgtttgaactagtgtttgggtaaataattaattacaatagcactaatccaaaactcgattttaacgacaaacatgagctgacgcggttgctcctacgagtggacaaacgtactgcattcggatcagatcacatctctccttgttggtacggagatcatgattgtcaaccaaaaccaagccgaaatggattgtttgatcctcacccaaaatatgcagtgcagctatgcgccggttgttgcgcagtacatatcaacgactagttttaattagtggagtctactaataagaatacatacaagaagagtgcatacattcgcgtacttatcttgttgatcacatcacacaagcaagcgctagcttgtggacattggcacaaactaaaatataatgcgatcgaattaattcccacgaaacacacaacacgacaatctattagctgcttggcagctgaactctttatttccctagttttttcttggcatataaacgtatagatgtcgtcgacgacgactagacgatcgagacgcagtttctatgcacgcttggtcaactggttcagcgcgggttctgctcgttggcgcgatataatcccccgggagacgcgaccaaacctctccagtaatcccgttccctgctctctctccttcctcctctgcattctgtgattctctgtcgcctccggtggcctcccctctcccactcgctcatccacatccaccataaatagctagctagctagtgccggccggcgccggtgcaggtgaagaaggtagcacgcgcggcgggagatagctagctaaactaggaaattaaagggccgccggccggcgggacgatagatcgtcaggacaggacgagaagagatcg

SEQ ID NO: 372 - DNA, 2000 bp, Sorghum bicolor
  source 1..2000: mol_type = genomic DNA
aaaaagggaagcttttcgctgcacagagcctgcaggatcgatccattgtcatggatgttaggctaggactgaattgaaagtctctgaaggcacatatatatgatcccggcatactcaggggagctgcattcacatgcagcaatgcacgcagacgcagtgaaaaaaaaatgaggtgttcaaccggctggcatcgtcgatggcggatttgatgtcacgacgatcgataaacttttgtggaaaaggtaggcagggcagcggtataggaaagaaaaaaggcagcatatatatatgccgcggcgctgttcaaagggttttgtgtcacacgccaaacaatccggggatcggctgcggatccaggctctgctttgcatcgtcttgttcctttcataccatcagtcatcagatgcggtggatactactgtatccatatcagccatggttatctatccatggatttctacttctgcacatgctgtcgatcagttagctgagctgctgaggttattcagaggcatagttaaacgaagtcctgccatatatatagtactagtagaatattactcctactacaaacgatgagaatatgctaccagatactctgttcagcatcagccgacactattttttttttaaaaaaatatacaattctcatttttccaagagacaaaaaattaggtcttgtttagttcaccccaaaaaccaaaaacttttcaagatttcccgtcacatcgaatcttatggcatatatatgaaacattaaatataaacgaaaataaaaattaatcgtatagtttacctgtaaatcacgagatgaatcttttgagcctatttagtcgattggacaataattgtcaaataaattaaaacgaaagtgctacagtatcaaaaccaaaaaaatcgcaactaaacaagaccttagtataagttaaaccatatttatacgaaaaaatatcgttagatcaataatgaattggtcttgttcgcttaaatttacctgccgaatctaccagtcattcaacaatatttttctctcacaataaattagcaaacagtatttgcatagcttttcagacaaacgagcggctaaacctattttgaccgaaatgttcaaactgaacaaatctatcatattattttcggagggagctagggtgtagctagtagggatgaaaacggtacggatattttccgaccgaattcgtttagagaggtttagatctgttcatatccgagtctgaatatttaacatccgatactgtatccgtatccgaatatttaaatcgtatatttatgatgtcgatatacaattgtatcttatccgacatgattgacattatccgtattcgaatccgaatccgaccacaaatatgaaaataaatatgatatcggtgatttccgtccgtatccgatccgttttcattgctagtagctagtaacactacacgctctttttcgcaaacagaagatcccggcgagtgcatgggaactaggccgcttagtgagatggatcgatcctctctcctccgttgtagaccgaaagaacaatgatatggttggacttggagtgtggtgtggtgtggagcctgccaaccgtctcatctgtcatcacaaggcaaaaaaaggcatcagatcactcccgtatttttctcgcggtgtactccggtggtcgcccggcgtgccctcctcccccgccccccgcggctataaagctcggcgccaccttcctggcctcttccggactcgcaccccggcctccatcgggcatcggccatgaccacctgcacctgctgcctgcctagctacacacctcgctggctcgctccatatatccgcctgcctgcttcttgactcatctatcagagtccttcttgctccgacgatcgatctcctgtacctagctagtgatcgagggagctagaagctagacgatcgaggttattgacttgagatccagctgctcgctgaagaagaagctgacgacgcaacccgccgccgcagcc

SEQ ID NO: 373 - DNA, 2000 bp, Sorghum bicolor
  source 1..2000: mol_type = genomic DNA
ctatattattgctttatacatgtgtcataaacttttagattttaggtgaaactaaacaaggtcattagttgctagttgctgcatgggctttacaagtcggccgtccacggacgacggcgaaaagtatttgaggaggccagggatttcaggggctgctacctacctgcctgcctgcctactaatacaccggccagcacatgccgattcctcacgccggccggttagagttttggcgtaacaagtttccgacctttgaaatcacaccgcgcgaaaatttcagttgagctactggtttagtttcagacgaatgaaaaaggtcactgataatggatatatacctcttattggaccaaaactctacatggttcactttgaatacatattctgcaaaatctttaatgttatattaattgtaagcctagcaagatcattatatttggaactagttagtacaccatggagttctataaaaaaagcactactccttcccatttcaagttataagacattttagctttttaaatacgtagcttttgctatatatgcactaaaatatacgctacatcagatatataataaaaataatgtatctagaaaattttaaatatcttatgatttatgttagaatcagatacatctagttatgtgcagcagccctcagtgcgagtatgaaataagcttgcaccgtattaaaaacgacgtagtcgaatcacgtagaaaatcctagagatgatattgaagcaattgcgataagatattagtatttgccaacgtcgaccataaattctataagcacaactccaaaagagtatgtgcaagtgattattgctctatcacacccctacttgatcctctaggacccactgattatgatcctatacaagaatttagtgcgatagaactgtctagcttaatcatcttgagctctcctaattgctcataatggatcggccccttgtgttggtttggttgatgccaatggttacctcttgtttatatagtccccttgaggctcccatacatgtaagtaggagtcattctaactccagtcttattagaactagaagtcctaataacacacgtctattgagtcctactacaagtagaatttgatgaatcaccatacaataatttgaaatagaggagtacttcttttactctagttccaataatgtgctctcaaatgggaacactacacatatgcataactagactgtcagacgctatccaccacacattgcctttttgcatctagatacatatgagatatgctatctatcaaatcatatcatatatagggaaaaaagtctaataccaaagataggtgtcactgacaactacccatcatgtgccatgcatctacttactaataatctcaccagacttaacatgtatgcaaattcttgtgagagacgacaccaccacatttagcccaagtacacactgactccagtgattcactaatcactatacggccggatgccatccggtgccaggctacctgcaaacaaacacgcgcaagcttgggcgattccatgtgcaactgtactttgtttacagaaaagacagggctgtggtggggtaaggcaaggctaggctctcctattatcaaagtagccaacctttttccctctggtgctgagatttgtaggggccaaccatcaagcaggaggtgattgcaaccaaacacacatactatcccacacattgacttctctgcatctctgtgcagctcatcagcctgactgtctctctcatcagtcttatatgttttttgtgctctctttgttgccttgtgctgtctcctctttctctggctccttgctttctgtgcctctcaacaaagggcagtgttccttgctagtatgtcatctagctagatagcagacacagagcaaagctgcctgggcaggcagctagaaaattagcaaaaaggttaggaagcagtgggatttggtagctaggtgttgcttttagccacatcgctttgctgcatcctc

SEQ ID NO: 374 - DNA, 2000 bp, Sorghum bicolor
  source 1..2000: mol_type = genomic DNA
cctcattaccaactattatttaccacatttccataaaatggtttggaatgccgaaatttcataggattcctgcaggactctgaaattctgatagacttttcagaattctacattcttatatatttttgacaggcccttgcgcacgacatggaattattggcatgacaaagaatatgtgttttctaaaaaaggggggtgggggggggggggagtatatgtgtaaactagtatatatgatctcacacgcggctctggggatgaacaagtcctgagggtcaaaacagatgacaccatgcattcaggatgctgctacattgtcagttacaactgcccatggacttttggcaggtcagcctagctagcactagcatttgtttggtgatgaatctccttccgatccgcatggcatggtccaccatgagttagggttcatagcagtacagccataactgaatggaaggacttgcatgcgttggactcgtcattctgaccgtgttacgtacgctagctgtacgcatgtacgctgcatcgtaggagtacgcttgctgtcaaagtactgctacgtgaattattggtgatgccattctcttaccaatttgagaggaaccttgatgacgttgtatggagacttaatttccatgcacggtactacagtccgaaatattgacaggccatttgagcgtgatgagggtgttgactgatgactactggcaatggaaactgatagtagtatttggaatatcactgtagtatcttgcatgatggccaaattgggagctacttatgttagaattatagctgttgtttcctgattattgctcaacacattttccttcttatctaaaggtatagtgttgaaatatgattatgttgtgtgttgcttgaaatgaaaaggaagcatgtcttattttcattttaggtggggggataggggcatccagagttttagaactagctgggtttcaggctttcagcaaagatcagctggttacttttaaaatttaaaatctaaattttttccaaggatctggattggatcatatggggaaaaaaatcaaagcagagttgggtcagatattatttacctctgctttgagccctatctgagtcgaatgattaacccatgtcaatgcccttgatgcttatcccctcagtaccggtgattctaatagctagatgaagacaagaagtaacattggagatcgcactgccttcttatccattgacatgttccattgattcagtaaaggctccattcttagatagatcctaaatggctaaatcctactcaagtttaactaagttcacagtagttggctcagtttcaacataccgtacaggtggcgtcctagcttcgtcgactacatgacacaccagtcactgccctagttctagcataagctgctccctatgcattggtcatcaagctatggtaaattgcagagtactaactgttcatcgtggctcgtgcattcctcacctgtcctaaatcctagttacatatgctagaattctttaaaaaagaaataaataattgcattgaacactagtataactaaggataatatattcatttgaagtgttttggaaaaaagtgttgctgagacacccatccatgtttcagaaagcaggatgcatgacacagaagttgatgagaaatactacacctttctgatgttctgtttatgcagcatagcagaggaatactataccatatagtccatagggtggccaaggaaacaaaaagcaatctccaaagtacaccgaaacaaaagcttgtgttgtgtcagcatcaaggtcaaaccatatccgtacttttttaagccctctcgccagctcctataaatcctgggcgcagctagctcataccaccaccccacgaccaaaccagcagcgcagcaccaacacacctgcctgcctgctcatacacacacacaccacgcacacacacacaggttgggaaagacacagaggttcatcagaactagagatcgagagag

SEQ ID NO: 375 - DNA, 2000 bp, Sorghum bicolor
  source 1..2000: mol_type = genomic DNA
gtaggtgggttcaactcaagttgcatatatatctgtaatatttggcttagggcactcccaatacagaaactatcatggtttctatagacattaattgcagtaacacctaagcattttgttgatgtggcaatgtagttattgaagagagagagtaaaaatcatagaaactgggtctaagttaaaaaccatgtctacacaaaatccaagacatgaagtgatatgattggctaagaatgaagagagaatgaatgtgattggatataaaaatattctatagaaactatccattaggactatagtttctatatatatagtgtctataaaatttaatgagtattaaaactatatatatagtttctagcattgggagtgcccttacaaatgggtggaaatataccctcaagttgcatatatgtcgcgaaaagtcgccgtgaaatgatgcatcagagctgtccaaatcctgcaagccataaatatgatcagtctttttccttttgttcgaggagtcatgaacagtagaatgccacacagtgtattgaccaaacaagacaagagataagacccttccgtccacgaccgcaaggaacaatgaccgccactcaaatctgtgtgcaatgacaaaaactgccttctggtccctgaaagtactatacaaaacccttcaagggatttatgcgtcttcaaggatgtgtatgagcagtggcagcaacaggaagctgcacaagcatcctcatctggtgacactacgtggtccctaatttggaaattatgtgtgtcgccaaaagtccgtgtcttctggtagcgcgtggttaatgactttttcccgaccaaagacatcctgaatcacagacacatagagcctattgcaaactgtgatgtttgtggtgatgataaagagtcagtgaagcacatcctattagaatgcacaatagcaaagtttttctggacgaagagcttatctggtgtcaaaatcccgcatttgcacccacttacctgggctcgggatttgattgatccaggatgtgtttctccaaaagatgcagcggtgatcttatgtggaatgtgggcattatgaatggcgcgaaacagcaggcgttatggtgaggagccacgaccagtgaaagtagcagcacaataggctatagacaccgtctttgatctctggcaggtgcttcatccggtgaaagaaagacaatctgcaagtaagccgaagttctaggaacggccggctgttggctgggtaaaatgcaatattgatgcagccttctacgacggcacccggtcagcggcttctggcgcaattcttcgtgaccaagatggaaggacgacgtgtggtggcacagctaaatggtatgaatattgtctgaatgtgttggctgctgaggccttagccttttgtgacggaatgactctggctcggcacaggggtgtgcgatgcctgattcttgagaccgatttgtcaggtgcttgttagcttatgggagaaccgttcgcaccagcgctctgagatttcagcccttctcacacagacggaggattttagtccgaactttgaataatttagtttccattttattagcagaaattgtaatatgttagtacatacttgtactcgtttggtatgctgtgattctcaagtggcggagtggccgttaaccccacctgatctcatggatatcataaatcgtgattgtaattgtatcattgattaacgaagctccggtttcccttaaaaaaagtatggtaccggcagtgagcttgcacacaatgttttgcatttccacacgttgcatgacggcgaatatattattagttcacaaagaaagggcgaaatagtcggcatacacacacacacgaaagcgatggttcagtcaaactccatccgcaggtattccttgatgaaacatctattctagtagtttatatatatgtatatatacacatctccacccttgcaagttttctgtcctagctagctgcaggcgcagcaggaattaata

SEQ ID NO: 376 - DNA, 2000 bp, Sorghum bicolor; identical to SEQ ID NO: 365
  source 1..2000: mol_type = genomic DNA

SEQ ID NO: 377 - DNA, 309 bp, Sorghum bicolor
  source 1..309: mol_type = genomic DNA
gcatggtgacttcacagaggaagaggagcatatcatttgcagcctctacattagcattggaagcaggtaagaaatcagtgcacaatatttacaaactgcatcgcatgtgcacacttggcacatgcatctacaatatacaactagtatatatacaagtacttcaatttcctctcttccctgaactaaatttgatcatatatatacttagtttttttcaaagaaagctactctgtacatcatatcccatatacataaacatggcatattatactgactaatttcctgctgttcattgttcatatgttcagg

SEQ ID NO: 378 - DNA, 2000 bp, Thlaspi arvense
  source 1..2000: mol_type = genomic DNA
ggtaagaaataatgttatatgccatattagtcacataagaaccacatataaagtaactaataataccatatgtcatattttcttatatagtaaatcagaatagtaataatatatatcataataattttagaaatttgtcattatgattttttctgattgattggaaattcgtcattatgattttttatgatctacttttgattaaaataacatataaaataatatatttttgtaaatattattatgaattgttaaaataaatatattaaaatatttatcttgaagtattatatatgttttcataattattttcatgcatgctataattacatcaatatatgaataaaatcaatataactttcttttatatgttctgattgatttttgagaaaattaaattattattttaaattattatgttgtatttataagaatattttttaatgaactattaataaaaatattttctgacagcagaaataaacattattaaagtattatatattttattatgaatttgaagaaaatacaatatgatttttattttttcttttgtatctataaaaatattttaatgaataattaataaacatattttttgaaaaaagtagtaaacatttaaaaaatattatatattttgttatgaatgataaaagtagaaaagattaaaaagtattatatattttctatgaatttataataaaatatttgtagataatatttttaaagtattatatactaaactattatttatagattatttcctttgaatttatctaaaaaatgaacataacatatgtgtggacataaaatatacaatgacatatcatgtaattagtctagcaatttaaatctctttaaaaaaattagctgagaatgaatgtgtgattgatacatcagcaaaatgacaccattttttattctacaaatttaaaattattttttaaaaatacttctcttttaatatacaggggattaactatagatgatgatgtctataccaatagaactgaattttttaaatcctatatgaatatccttagaggtctataacatcaacttttattagtaattaattgattctcttttaatatacaagggattaactatagatgatgatgtcaatagaactgaattttttaaattttatatggacacccttaaaggcctatagcattaatttttattagtaattaattgattcttatgttttgaaaattaatttggagtttctagaattcaacttttttcaaagtaattgagtttcgtggtatcaagatcgcattcgtcaatttgtacaaattaggtaactttaagaaccgttgtttgatagataaacatataattttcttaaccaaacataatctattcttgaaaaatgtgaaattttgcgttgtgtggttgaagttttcttagagaaagagaatatgcatgaaatcatctaattggattcttttagtaaaagaaaaaaaatatatatatatatatatatatatatatatatatatatattcgtgaaaaacatagtaaagagtaagataaatgacaaagagaaagaaaactaagaagtaatccaaaaattgggaggcctactctcaactaccaaaaatacaaattagtgtttgttgtgttaggtcatttattcagtcacctaaccctaactatatgaaatacgttaaaattcaatatatagaataataaaagaaatactattagtcaatataactcttatttttttaatgaataaaaaaaacgaccatctttcaatcaagaccgtccaagtattctctctttcacataattctcacgtttttcctttaacaaaacaagatttctatgagcttgcgggtcccatgataatcctcattgaatttccccatatatatctcatgcgaatccaactcgacttcataacatttcaacattaatagttaaacccaaccaaagttgcattattcacaaaccaaataactttgctgtttcctctatttggatcaaaa

SEQ ID NO: 379 - DNA, 2000 bp, Thlaspi arvense
  source 1..2000: mol_type = genomic DNA
ctgaaactgaagatgagaaagagaaagttgagttgaaagagtcaaccgataagaaaaggtcgtcaaaaagaactaagaaggttaaacaagcacccgaagaggagaaatctcttaaaggttctgcaaaatctggtcgaaagtcctccaaacaagttgataaatcaacctcatcatcaagcaagaagcaacaacttgataaagacagttcctctaaagagaaagagaaaggcaagaaacagacaagtaaactacaggcaaaggggtccaaagatcaaggtttgaacgagttctcagctctgttttcaaaagcttaaatctcattttagtagtttatcgtattgctgtgttgtgattgtggaggtacaggagaagctagtaagaaaggtaaaacagatcccacaagaaaagaaatgcatgtagtggtggccaaaattctgaaggaagtagacttcaatacggtaagacttcagtagattgaaatttgacagaattatatacaaactgattaccaaaacttcaaacttaaaaagacattatgatctttgtttcgaaacaggcaactctatctgatattctgcggaagcttggtatgtttcacttttttctcaaattataaatgttatctccttctaaattttacagggaatgtttttacattaaacgttctttttgtttgtttgttctgcttgtcataatattagggagtcatttcggagttgatctcatgcataaaaaaacagaggtgaaggatatcatcacagatgccattaacgaaatgagtgatgatgatgaaagagaaaagacagaggatgaaggtgagaacaagaaagcagaagagagaaaggattagttttgtctttcttctcatttcctcaaatcggaatatgaaaagtaggaggacggtttaacataaccttcatgtgtgaaatcatatttgtttgtactttagtgtattgtgatgtgtaatctgttaggcttatctagtttcaggttcttccttcatacttgagtagctgttattaagtttctaacttattgtttactcttttgtttaacattgtatgattggatgtgtattgtggaatttgatttaattgggatgttttgtaagattgttaaaagtttcttccttctctattttattcacgtctaaatagagttagtttcataatcatttcttgatctctggtatggtgttctaacctgagtgtactaatcaattgtatcgattcaattcacagtttgtaaaagttgcgtatatgcgacagttttttcacactttgtcctacatctagcttttaatttacaagtgaatcatgttacgcatcctgagtattatttcacactaatctccgtatatatcaattaaatcctgacaatgttaatcatcagaggtatcatttctgaaattaatttatcaaaaattgtttcggaacctaatgaaacatcctcattatttcaaagaaagatacagctttgacttttggggttaaataatagaccctctacatcaaatatgaccctattgttataaatcaatcttatcgttcaactaatcagttatgctcaataaatttgtatttattcaagcaaccgtccaaattaactacaaaatgtatttatgttgctaaagcctttagtggtccttatcaagctttaatttcctcattattcagctacacaatcttcacttgctaagcaagaatcctaaaccctaaattctacttaaacggttaaacctcgtaggaaccctatttgaagatcattcttggttcttaacattctccattccattgcaaaatctttagtggtccttaagctatctctttcttatctctttagctatgcagtaggttgctacacaagatacccctagcaataatctctacttaaactatatatatatcaagatctatcctccattaattcctcattttctccattggatctaaagacttataactaaacattttttggttttttcaacgaaaacccttgaa

SEQ ID NO: 380 - DNA, 2000 bp, Thlaspi arvense
  source 1..2000: mol_type = genomic DNA
caaatccagtcctgtctataaaatgtgatacgtcctttgttgagttttatacaatagctatttctttttctttatttcaagagttctgtaattgaaatgttaaaaaaagagttttataattaaaatttaattaaaaaacgttttactcgaaaacaaactgagatttggtttgactttttggacttagattttgttttcatgatattatactatggttatgagtttagagagtaattcaaataaaagcaaatatgtttatgatgtgattgtttcaaattgttcaatttgtttcgagccgctggtgtataaagatgatgatcgaacccttgttaagtttcgatgtgaccccaccagattcctctggataacttttatcatatcaaagattaacaaaggttcgatcattatccttataaaccaacgactcgtgacaaaccgaacaatttcaaacacttatcatgaacatctttgcttcatttgaattactctataaactcataaccatagtataatcttatcgaaacaaagcccaaatctcaaaagccgaatgcagaacaacaaaaaaagttacaccaactctcaattagtttttgagtaaaatagcttttaattaatctcaattataaaactctcgaaacaaaaaaaaaagaaatcattctgaggatatcaaaactattgtctgaaactttacaacgcatgtgtcaaatttatagacgggattggattcggttgacattaataagctgctacccaatattattctttttggcaacactttaattttttttgttttatagttctctttttttctaaatgttgttgacttttaagtaaataactagcctaattaagctcatcatttctggtctctttttttagtccaagtgatattatgggttttaattaggcagtaacttttaaaaaaagagagattattattggattgaaatattggatttggtgaagtatattcagtttttcttgacgccaagttaattcaatcaattatcaatataagactagtacaactaatgctatttatatatagaatcctatccaaatgagatcttttcgtttgtgaagagtttggtttatgatttggtggcttgatactagccaccaactccctttgttttacactgaaattaaatcaccactatatttgatttattaacagaagtcaagactctacagttcttcaaactttaaatgtaaacataataatagatccaacacaggctgttcaaagatggccctcaccaattgttaaaaatatattatgtaatcgattgtttcattgaccatctacgcatttatttgaagtatatttttcttatattacaacaaagtattactgataaaattccaacagcgtacaaattattatccagttatttaattatatacaatttaaacgatcccaatatttgtgcccggttcttgacatgtacaaggtcgaaaaactaacaaacaaaaattagtatattctatggtctgcggtattatatttcttaaataatgaacgtgtcagtatggtgaaaccatataattcatatatgttcttaaattatgaaggtgttatatttcatctcttggccatgatgaagccataacaagagtttgcactagctatatattcaaaagactagaattaagcatgttgatgttgcagtgaaacaaaatcttctgatcgaacagaatacaataattgatataccctgtaaatgtaattaaacttcatttttatagcatttaaatgaaaaaagaaacttaaaagtatttaaatctccagaaaaaaaaatgtgttcctcaaggctcgtctctctctctttttcatctttcttctaccatttgctgaaattttacttgtaccacaattaacctcaaaccctagcctctacttaaccccctgataaaatcacccaagatttcagagacattctcgattctccaaacatataacatcttttggtttttcttcacggataaaaacgctagaa

SEQ ID NO: 381 - DNA, 2000 bp, Thlaspi arvense
  source 1..2000: mol_type = genomic DNA
gtgttctagtcgtcagtatagctaattactatatatctcataagccataacatttggatgtagccttatcataagtaaataaaaactgagttgtattggaatcaaattggagtcgaaactattcaagctcacatctagatgccagcatcagggcacttaatgttgaaacgatattttaaaattattagtgttgccaaatttgtgttaggattaggtttaggtatagaggtgatgaaccatcctcccctatatctaaatttgtctggatagatttataaattatattaacgtaagttcagtgtccattgatcatttgtttcatatcaatccacagttgtgattattataagtataattgtccctttctttgtttgccacttacgaattggagcgcgatacaggaaattaattcaaacatcaaataaaagcggcgattacgacccaaatgccaataacattaacatactactgtagatacttctaagtgcgcccccaaaattttcagttaattttatttcttattttgtgtggaaattttgataagtaataaaacttagatgtgcaacaacaactataatcgaaaggtgtaatagataaccttataaaaatttgataatgttgacttctgaataaaacgattttctaagtcggtttgtaaagggctttcgaaaaaactgattgtgtgtattttataaaaccataagaaaattgtaatgataactgtcggtatattcctgtaatatgtgtatatatgatcatacaataagatcgtcatagtaatgaaacttgattaccagatgaaaagatgcagactatgactgctactaacatttaggtatttaagaaaacgagagacacaaaagaggaaagttgaggaattgggattaacgagtcggtctcgtttagagatgggaatttcgactttcgagagccttttataacgtttgtcttaatcatgcatgcaatcatataagtctggcattatattttaactctaaaactttgatttttttttccattagtatgcaatgttagatgtgaaccctgtctacctgtcggtgtcattttttatagcctcgctcataaatccaccttctagaatttttttagtagatctatcatcttcataaaaaaatttaaaaaggcatctcaccaataaaaaactctttcgaatttattattgaaagactctttcgaatttttatttgatagaaatgctataaacactaaaagcaccccgattagtgtgacagacaaagactgcgaaatatcgccatatagaagaaattaagccaaccattaaaattaagaaagtccatcataaagatgacaaaaagcccgagtgaaacctaattttgggtccaaattgagacgcaagcaatcatcgtgttttgacgggatgttagatttgtcaaaatctgttaacataggaccgatcaaattaaatcaatcagaaaaacgtaacgtaatgacgggatgtgaaatctgtcgatcggtttccacatacgtacacgtgtgcacatatgtgatcacgccttcaaagccatgaaatatataaaacacttacataaggccagtgacctatttaggtgtacacgtgacctaatattggtgcagcccgaccaaaattcggatgcaagttggtgaaagttaagccaacgatttattccgttatattgtaacaaaagaaacaaaaaacacgtgacgtccagtatgcttgctcatattctacgtacagaaacatatttgacttcaggaatattaaaacttattttaatgaaaattcaggaatattattcaacgaaaataaattaatgcgttcaatatgaccaaattaaaagaaaaaaaacaaagtggttgcgaaactgataaactgccgtgttatattgcattagctagatacaagttacgccaaacctaataaaatatatatatgatccgagattttcatattagtacaaaccaaaaactcacagcaaaagaaaaacaatcaaccggtg

SEQ ID NO: 382 - DNA, 2000 bp, Thlaspi arvense
  source 1..2000: mol_type = genomic DNA
aatgtgtgtatgttaatgaagaggtagccaagtgaggtattgtgaggagccttttaaacgtaatttgcattatatatatgtctcagatgatatagttgtggttcttgatatcaaacgatgcgatcttatattcctctatttccaattcacgcttgaaactcgatcaaaatcatttactctttgctagtctttttaatgaagaagtatggaaccataattttaaacgcttccactctcctaattttgcgaatttcctacgttttgtgcgatggttacttcagctggtaaaagggacataaaaagctttctttaatttggatttgatcttttgattcttgatcttcttgtctcctctttttgacgtgatgttccaatttgttttacaacatttttacctactcttttagtaaactccaagatataagtgtgttatcttgtctcgacaaatccattaatatatctaggacattaaggcttaagcctctacatgttaagagggacttgattctcaaagctatcatgcagatgtttcatatatgacaaagtatatatagtctggaaaatacgattacacacgtcacatggcaaaccctgtttttggctatggtctcttctggggtgctggggatatcgtgttattggcttcttatttatcattttcaactaagttttgacagtttttgtttatcgtagagatcattacaaacaaactttcttccgtaccacttggtttaactacgtttacttcagtaatttattcgatctagtttaatatatgtaaaatataaaaatatagcagattttgttagaatcaaatcaaataacaataaaaaaatccagttaaaaatacgatattgtagttttactaaaaccaaaccaactttaacagtaaataacaaaaaaaatgcctccaaaaatgggtttgaattcagaacgcaaatcttattttatatagtttcttttgatgaaagtagccgatttgtttccaaccaaacctgagctaacagagttagagagatggataggaaaattgcacaaggaaaaaaggctttgttaacacgcaagtttatgtcaagtgttaatacataatatagataatagacgcgaaggtaatgtgtaaaatgttaattaaaaatatgatcatatctgtaggaaaaatactattgcaatacgtacgttttgttctgcttatgtacttagaatcccaagctttctgttcatacgtaactttatcggtcaggtaggtaaccaaaccggaccagattaattaaaaactgatatatggttccactttggcaagttctctcacgaccccgccaccccccccccccccaaatatactaatcaaacgaaaataaactgaaccaaacaaattataatttgattgggattgggattgggactatagtaagtttctctccgaccgaattaaacaaaacataactgaatccaaacggtaaagacacctatatcgaccatgcccttagtttccaattacatatatactcgtgcacgttccactagagaaagagatattatacatattggcacacattaatacattatatttattattacaattgctagaatattgtaatctcataaactatatgcaatacttatataataaggtgagtaacccgataaaatccgtatacacatggcctaattttggtgcattctgccaaaaatttggacaatattggttaatttgaaactatctctttttttttttgttatccacacgtgacgtgtgtaatcgtattttctccacatctctctatatataatattgacttatataagacatcattattcaacataaaaaagcatgtacaattacggtaggtgcaatattgataaactgccattgcattagagacgagtcaatccaaacctcataacataaaaacgttataatccatttttcttccatctccaatcaagtcacaattaatactcgatcaaaaaaccaagaaagaggacagatcaaattggtg

SEQ ID NO: 383 - DNA, 2000 bp, Thlaspi arvense
  source 1..2000: mol_type = genomic DNA
aaataagaaaaaccaataaaaattagtatgataagataagatcttgaaattttcaaggatatgttatatattatcaatgtacgaagaatcaatgactagactttcgaaatgcagattacaaagatttttatcatttcttagcaaagagaccaccgaagccgccaccgttcttcttctggggcactgccacggaatttttaccgccagaaaccgttttacgaccgccgttacctccggtggttccttctttctcgtccaccttcttgaggagaggattggtctcgtaaaactgatcttgcttcgttaaactgccaagaacaaagtcgatgatactcttctcttctttcggggtggtggtgctgctggttcccttcgcccccgtagcgaagcacctcactgtggccggagcaaaggacattagtagcgaagaaaccattttctttgttttctgttctgtatctgtcttcttctttgtgttgtgtgtttaattttcgagtggcttatgttacaaagggaatggattgtcggtgaatctgagccgttggatcgttttgacatgtgctctccacaagtgtcttatcctctctttttctcctttgcacacatgacacatgtatgaatgtgtatgtttgggttgaactgttgatgatgagctgatgatgttgattaggattagcatgatggttcaaacaagttttgggctttgtttaagggtgatgggctttgtatttcatgtatattactcatagtctatatttgtaattttcataggaggaaactgatacttttgacgattgggtgatctgaaattttgacaatattcattagagattaaagctaacttttcgcaacccaaaaatatatttaaagtttgtggattgacttaccactcaaatactcaataaaaacaagagtgttgaaaaaaaaaatgcttgaaatgtctaagatattttggggcaaaaaaaaagtttataaaagaaatgtatatgacatccgtggattaactaatatttcatacttgtatcagctgaagctgtttcctaaatatataagttaaccaaatggcagttgaatcatatagactatagtcactatattcagttagctagtaccgttcgaattcaaccacacatgatcttttatctttaccatttttgatattttgtccgttgagttttcttagaattttgttttttggtaaactatatttactactttagttttgtacttttatttacttatgttgttttcaaatctttcgcaagtgttgtgctaagtgttcgaatcgaagcaaaccccattttgtagaatggggtctttgtcaaaaaaaaaaaaaaaaaaaagaatgggctaactgccattgaccaaatctttattctcgaagaaaatatctggttgcttggctcatttcatgtaaataaagtcgtgcttttatttaaagaataaagagaggaaaatctgaattaaacaacaacaaaaaagagatggaaaattgaaatgtttatttcattttgattacacattgcatagattatggaagtttcaaaccttgcgactttcttttgttgctaaaattctaaccttgagagttgagttcgccaatatcccataagactcatttttattaacttaagcccatgcatatacagttaatgttcacgtattttcgttcactctcaagttttttcttttttcttatataagcagcatgtaaaacgaatattatgacccaataaaagaaaacataaatgaaatgcaaggggacaattaatttgctttcgtgttatgttatcccaaactatacacacacaatattcttatcgaccaaagtaatattttcccaactactttctcctaattgaaacaaattcaaaccttttttggtatagcctatggtaaaattatttctcatttctacatatatacacctccttctccttcaccatatatatctctcaccaattcctccatcaaacaaaaacaaaaagcctaaccggaaa

SEQ ID NO: 384 - DNA, 2000 bp, Thlaspi arvense
  source 1..2000: mol_type = genomic DNA
tttcatctcttttggtgcatatcattaactcctatccttttcagaaggcaaatatatattaaatagcaagtgattcatcatccaccaaatgtgatcctatgattggtgatttttttttgtttgaacagtttagttgatgtatttgaacatttatcttgaatattttgatatactgtggatgagttggatggtatttatctaataacttctagatcaattagtgaatgttaagtattcggataccatgctgtactttttttccaactcatgctttgttttgatctttgataaaagaaaaactttgtatgctatattttttaattggtataacaaagatgtacgatggtctatctatatatatccattataaaacttcagttagatgataaattaaatattaagtgttctcatgtttatatatacattatgcagatattgttcaatagaagtttgtgtatataaaaatgaattatatcttagtttgattcacacatttccatcaccaaacattcgaagtatttgtctctatctcgacaacatatataatacacacctctgtgttatactacaaattcaagtactaaataatatatattcactctatatatacgtacgacatacaagtctaactcaatcacttattggtttattttttttgaagaatattgaattgttttattatccttgaatgacccagtctatcacatgtaatcaaagtacacataatcggtctttctttcttattcgtaaactgccatgcaagtggggcttcaagctttcgtaaaatcttatgtaataacttatatatatacggtgttggaagagaaattgtctttacaaaaaaactatatatagacacttcacactgatcatatgcaagaattaactaatccatatgtcgttccattataatcgaatttaacctatttttgcatgcaaattactaaaaaaaattataagctaatcacactcctaaactgcggatcagatgtgatcattaaataatataaaaataacccactatgctatataggacatgaatcatgaggaaacctatagcgtgtaatatcatacaataaattatatttatgcgtatacattaactagaaacatagaatggcggatattaaagaagaacaaaaattgattgcaaataaacagtgatagcgtaacgattaattttcaacattaggctataacctatatatagtataaatttccgagtctaccatatgtctattttagacaaaactcaaaaggaattggagttagagttagatgcaactcatgcaaaatccaacttaaaacttgtttaaattgatttttttttttaaatagatcatccataatataatgtaaaaaatgttctgaagtaagatgagacagcctaaaatcaaaaatagagggaaaacataattacaaaaacaaaaaaatcggagaagaggaaggaagagagaaatgttcaaagggtggcgggcggctaagcaaacattataatttatggggtttaaaatatggttaaaaattatatttctttgttaaattagtaatgatattgaatctctagattctggtgtaggagaaaagacaaaggagaaaaacattagtctcctccttctctgtcatttctaaattctacaaatattttatcacataaatttatcatgaaattttccaattccataaagtcacttttgatatatttttattttaattccctactttttgacatcttcaatcacatgaaggactatctcctccagctattatatacatctctccttttttttcctacattcacatatacttttctccattacacacatttccatgtatgtatatataaaaacctcacacacacgcaccatcacacaccatcatcctcctcctcctcctcaccctcttcatcgtcaacgtaattgagaaggagagaaagagagagagatatatatatacaataagaacaagatcaagaacaagaataaacaagaatcaagaag

SEQ ID NO: 385 - DNA, 2000 bp, Thlaspi arvense
  source 1..2000: mol_type = genomic DNA
ttgacccagcatttagtgggcctttacatgttgaaattcgcaggtaaaaaacgttgttttacttttacagttttacacagattaatacgatttctcgctctgattataagtttttaaaaccctcatttgttatatgatgtcttaacggtatgttgacagatgcttgtttgttgtttagaaacaaaaagattttaaaaaaccattatttattttctaagcctggagaatatcacttttgtttgtttcaattatcttataagtaataacttagctaattgcacacacacaaggaaaaaaaaacgtaatagcttagtttatttttctctaactaatgctttttcaaaggaaaattaaagaacctctcaatctttcattctatgaacaaaagtataaatttggtcccaaataccatatccaagaattgtctcgagaattagtaagataaactaaaatacttaaagtcaagaacttgaaagttctacctgcttaatttgtcttattcatttccatatgtcgactctagacataatcaaatagataatgttttcgttttttcggcttgaaaggatcaattattacattttcactgcaataagaaaaatcagtatttgttctgttcattttaacgtccattgaatgaatatgattttggatgagtgagagtgcatgcttaagataattatattagattttataactttcttttcgagtttaagaattaactcaaaccatcttacataaattataaaaagtttacactgacatcacttgactccgtcaaatttttgtactcgtcgtaccgagaagaccgattccaatagcgtgttgaaaggtgttttattagatttttgttttttaatcgaatttgataaatttttgttttttcctctcactttttcttgcaaccagttgctttttgtaaactaggatattgaaagaatgtaatgttcttttatttttatttctttgaaaacttcagaattaactctctcggtcttaggtcaagtcacccatttgctttttcatctagaagagtatgagaagaagatggttcaattatatttcatttacacaatacagcataatctaaaatacatgaacaactaattcggggtttgctatttttagcttttcttaattatcacctaaattaaaccggagaaagaccatatgaaacatttgaaaggtttaaaaacttttctagtaaaggtacaagtttaacaagacaacgaagtgaaatcaaaatcaaaacagtagataaccgaaacaaccaaattgtgaatcctaaacaaaaaaaaccttgtttaaaatactggcttaggcacatctttattcaaaaaaatttcaaacaaatatcaagattttaactatgagatgaaatcattgtaatgatcaaggtgttatatacttattaaactggtagtttaccaaataacttagctacggattagataaaattaacgattcacatatttttcggtcaacgattgcttaaaccaaagaagttaaaggatatgcgggactatatatataatacaattgtatgattgtatagtacaagcattcacattagaagaatacaattgtgttaccacagatgttggaataacaaaaccatatgttgtcacgtttacctttcttcattttttgtgtgtgtctccgtaatatacttactctctcttcagtcttgaaatacttataacatattttataatttttgcattttttgaatttgtttcttagtcatattcacatttattggaattttaggagaccgatactactgataccgtttcctcatcatacatactttaatcgtctatatacacacgtatacaaacagaagtccacttgtcatcattcttcatcaggtttcctcatatatatacatatagatagagactaccgaagataaaaaaccttgacaacaagaaaccccattgagaagaagagaaaagactaatttaacccaaaaaatatatttttccttttaaaaacaa

SEQ ID NO: 386 - DNA, 2000 bp, Thlaspi arvense
  source 1..2000: mol_type = genomic DNA
gtttacatatttgtttctgaattgaatatttcacgtccaatggtttgtctgaattatcgtacgtctttatgacatcatcactttattgaaagaaggagaaaatttcgagaacgagagaaatggtgtatcgagaatgagaacgttaagaaaaataccttaaaacacgactatttggatgtcatgattatctcatgattacgaaataataacatactgaacttagtgaggccaatttgaatgacttgaagtctataaattaattttttttctttttaaaaagagaaagaaaaaaaagagataagaagtgtgtttttcatggaaacaaactttttcacctttaggatgcttccaaaagactcaatgggtcctaatataaaaaagtagcaaaaagactgaatcatttgaagagacaaagaaatgtctacacaaaatatccaaaactcttccatttatccttttaaatttcttttattcatcaataatttaaaacctataatcactgtagcgtgtctaatgaaagtttctcttcttttcgaccaatacacatcacaactatatttgtataattgtatgcaatattcttacttggctacgttgtatatagctcgtcataaaaatatcactcatgattttcaataagtattagcttttatgagtttgttataataaaaagaggtggcctacgctacaagaccaattcctaccaatggtgttgaaatctgaacaaaaatcattttcatttgtttaaccctgagcttcaaaagttcaaaactttacttacttttcgtataaagaatacatataaacagtgtgaaaaaaactcaataattagaatcgatcatgactttatttctccaagtgctttgacttttgaaaacctttatttccaatctcaactcagagtcaacctttttttgttcatctagaagcgtcgcaacgtactcttatttttactacttacttacttacccaaataagttccatttataaagaatttacaaattcagaggaaaattattaagaatacaaatttgttttccttattatatatgtcggggagcgttcatgacatagatatatcgaataaaagctataaagccatctatgatcgatcaatcactcgtttctttattttcttattatttttttttgttttcatcaagttttttctaattattttatactggattaattagtttaccggatccggggtaaaatttcttcagtttggcaaattttgctcacctaccataacgaatttttacttttatatcttagattcttttttctttttctttttttttgggatgcaacctcttattatatatacagtattttcaatctacttttggtacatatactttcattttcagctgcaaagatgtatacattttatagttgaaaatccaacacaaaatattcaatatatatcaatgcgaaatacattacggggcctataagattatggaactcctcgttgctgcaaaatattttacacatttcatgattataaattctataagatactcaatacatcgtttggaagaaactagataaatttcttttaaagacttgcgtacagtacaatagaccctccttatcttttctgccaattcttaattccactattgtatactattttgtcgtgttcttataatatatatttttttaatttccaaaaagttactttttaatttttggggttttttttataatcctactttttgacatattttctttcaaagacttttttagcatcttccattccatcgcatgagataatactatctcctccagctattatatagtctcctttttctcttttctgctttcacataacatttcccctataatcacacacatatccacaccatcattcccaccaacataaataatcttgatcaaacatacacataatagaaccagatttcaagaacaagaccaagctatcaagattaagaacaagaaaagcaaaaagagacttcactaggagaagaaga

SEQ ID NO: 387 - DNA, 2000 bp, Thlaspi arvense
  source 1..2000: mol_type = genomic DNA
aatatagtttctcagtctaagggtactgtattttttatacaaaaaaaatcatgtatgggttacttggttagtaaagccactacaaaacagtgaaatttagatattctgaccaaaagaccaaacaactgaaattttcattttaataaatttcgtcaaataaaagtgtgcgagagagtgagactgacctccgttgagccaaaggacgagaggacggcgagaagagttttgttgggcttcgaagaaccaatagaagagtgccttctgcgtctgctgaggcccgagattcacgtaaccggcgtagtgtctgaagttaaccggtggttgaccgggcaaagcggtcacaaggtcatcctccttcctcccggatgaagccgtcaccttcttctccggtttcctaccacaggctatcgccggtaacaccagaaggcacagtagccaaagtgcgttcctcttcatcgccaaacgctttcacctttttcctttatttttgttatttttccaaatgaagagtatataacaaagaaaaagaaatgaaaaaaagagtagatgagaaaacaaaacgcccccacttcttcttttttatagtgctgtgttttttataaccttagatcttatattttcgtttatcgttatatatatacttcacgagttcacgtgagtattttagaacaacaaaaaaaaacattttataattgatcttttaaaaaaaatgaattaaacaagtttttcaaaacgtataagaaaaggttactgtttaggaattttggtaatgaataatcctaagctaaaatttaggaattttggtaatgaataatcctaagctaaaatctatggccctttaaaatttgaataacatgagagaagcttcatatgacaaagtcattcacatgtcttaatgggcctcaatgggcctcattcacaagcatcagttcccctctccccatttaaaaataaaaactattgttccaaatgattcagtggaacgagagcacaagacccatatgaaattaagatgatattttgttttagctatttaattaaaccattgtttttttaataacaacacatgtatggattcttcttcctcttcttaggaatctcatctcgcagaacaaggttatacgaaccatataaataaaaatgaaattaatcacacaagatgctcaaaaatgtttatagaatatttaaaattctgtaaactaattgcgtgtagtactaaaatatagagtttcaaaacaacagcattgtcataaacacagaaacgttcaaagcagttctatgttatattccattgatcttaacatgcatctacattgtattctaggaagagcaattcatactcctcacacaccgtacctaacatgtataatctcaaaacgaagcaataaaagaaaagatacacacaagtattaacttctcatactgatgtaaagaacaccttttctatactaacagatgacatatatagtatttttttttttcctatttctgttgacccaaattactggaaatattaatctcccatccgtatttactgacaaataaacaagtgtgtccaacttgacgaaaccaaaacaaaccctagatagataagaacttaattaggtgatccgtcaacacccacctgtcaacttctcttctatccccagtagaaacctaattaaaatttaaatttggttttaatattttgatcatacttttctaatcaaccctcaaaaagattcgtcccttttaatttccaaaccgaaacacgagaatcaagagccgcacaaatcaaaataccgttagaaaagaaaaacaaacttttcagctcaccaaatcaaacccaattccacacattgaaagccaaacacgaaactcatgcgtcttaattcgttcttctctcgtttcacattcttcacccactaattaactaacatctttcattatttgtaagctctctttgcgaatcattcatctctcacattcacactctgtttcttggctttctctttgtcact

SEQ ID NO: 388 - DNA, 2000 bp, Thlaspi arvense
  source 1..2000: mol_type = genomic DNA
aaagaaagtggtaagagtgtaaagttcacactaatagactcatgtaaagtaaaacacttacggggcttatctgcagttgggaaagcattgtttccaccaatggcgaaagtaagaccgctttgacgacgaggagggcttgtcgattgtgatcctgactctttcttgctaacatcaggaagaaggattccatccattaaagagcagaagttttcaacttggtagtgaatgttctcttggacttgtttctgctgctcagataatgaggttttaccagccatctcaatgatctcttctgcatccgtctcctctgcttctcgtcccaaccgattatagctattaaaaaaaatttagttttcatgagcgtaaaaagtggatgtaattttcaagaactggtaacttacaaggaacagctagagctaaaatgaactaacttaacgactattgagtgtgataaaagcagtggctagttcacaaatccataaagaaatcaaacttttctttttccgagacaaataactaaccttgtatacataaacagtttgttaatatctgcttcaaattgcagttgccttgggttcttagcaaatgtggtactcttggcaagaactccaacagcctgaaaaacgcaaagtaatgaaacaaattatacgagcggtaacaatagtagcaaggtaagatcattcgaaatctcaattagtactgcctaaaatcctactaaaaccccctgcaaagttctgaaatgatcccatgaatgcctcaggacgagtaaattgatcaaacgagaaaattcaaaaacatttaacaacacagcaaaactttacgattcctctccagtctaatctcatctgttctaatctaattcttgcaatgccacaggctgaaaacagcatgaggatacttcaaacaaattgattcagatcgaaagactaaatccgaataaaaacttaaactttcttcgtacccagtattataaatcgtaccggagaaggaaaagatgttcagaaaattcgacaggatcaaacaaagacgcaagaggttcactaacttgctgaaacttgttgaaaagagacgccatttttcttcttttacttttccagaaacgattctccaacctctttatagtaagaatagctagaaaggacagatgaacatcaggaatcgcaagagctcgggtcaaaaacctccattgatgaagatggctgcatcttctacatactcggcaacacacctccatggttgaattataccatgtctgggcctaattcttaataatgggccaataagcagtgctttcagagcctttttatattctctggcccatctttttgtcccaaaaaggttaacaacaacaacaatgataacatttttagccatctccataaattaaccattgacaacaaattaatacgtggttaataagtattaagattatcattttgtttatactgatgtctccatttaatttggtttattgggaatagaaaattcattaagttactcataaaaaaaaaagcaaacgtggacggaagcaataagctaaatgtataatggagtatttaacttaggttacccatcgccaaccacctcttatctgatcctttctcaaactagttcacaattatggtcaaaaacacaactaaaaacccccatttttctatttaaacccccaaaacgagtcgacctttgaaattcccaaaaacacagccaaaatcccaaaagaaccctacttaaagtgtacgaaaagtaaaactaataatacacacacgagaatcaagactcaagactcaggagccgcaggactataaagacacgacatttttctgcttaccaaatcaaaccaatttctcctgagagccaaagtttttgtcacccacaagaaattcatgcaatattcttcacccactagctaaccaacggcctccattgttattaatctctcttaattcctctctccattcttcatttctgagattcacattctcttctctttgtcaccaaaa

SEQ ID NO: 389 - DNA, 2000 bp, Zea mays
  source 1..2000: mol_type = genomic DNA
ataaacttgctcatctttgttgctacaactcacgatccaagatacaagttatctaattataccaagttagcaaccggggaaatgtttggtgaggaaaagggagaaaaagtttggaatgcagcgagacaatgtttatatgatttgtttgaagaatatagaaacatgtattatctaaatgacgattcaatggcagaagtcaatgaagatcaaactcaaaagagaggaggaagaatgatgagatcattagttgctaaaaatatgaaggtaggcggtagttcaataggcactaccaaatctaaaattgacaaataccttaatgagaacaatgaagatgacaacaacaagtttgatactcttacatggtggaaagtgaatgaatctagatttcctatattggcacatatagttagtgatgtgttggcaattcctatatcaatggttgcattcaaatcaatttttagtacaagtggacgaattttatatgatttaagatcctctataacttcgttcatgatccaagctcttatttgtacactaaattggttgcgacgatcaactcccatcaacatagaggaagacgtggaatagctagccaaactagaagaagacaagcttgtctactagtttgtgaataggttttaacttgtctatgttatcaactgcaaataacttacacttttaattgtttttacgttgtacttcataattaattgtagaacataatgatgcaaaggctatggagaaggctgctaaaagtagatccgtcaccaagccatgttcaaatgctatttatcatgtttaaagtgtgtgatgcactttgagcctttgtggcatgaatcttcactgatgcactgatggtatttctcatgtttaaagtgcatttacttcagttatgagtttagtcaatgtgttgctgttatgtgtaatgaatctgacacactgtgtatcgtgtgcttcactgattatttttgaagccctggaggaagttgtttcttttgcaaatgacttgttatttattgtattgtgcgtgctcatgtgttgtttactgtggccggctgctgcttagcctgcttgtttgctgctgctgtttactgtgctcatgtctggctattgtttaatgtgcagtggccgactggccggctgcggcttgctggtgtgctgtgatgaatctgataggctgccgctggtttataatggccgttgctagcttgcttcaattgttcagtactggtggcatgtagagcagcagctacaatacagtttgttttttgggtaaaatcgaaagccaaaccgagtttaacggttaaccgaaggacagattttcgattttccaaaccacatttagattgttgttgttttagaatccgaacttttaaaaaataaaactgaaaaactgaatggaacaaattcaattcactgattgcccaatcctactgccccgttcgagccgaatccactagaaaccgtttttatgggtattatagtattcactttaattcatatgtattgaaatacagagatataaataaaactaaatcacactccaatcaatctcaatacacatagaattaggtgaatactagagtatccaaataaaattttatgattaatttggtaattagagatttcaaaaggatctatgatcaccaaatcggtttttatggagaaatttgataggggctataaaactggagcggattagagttggtttggtgacaaaaaatagagagaattcatggtaacaaaatcctattcaaaattgagaaaaatagtaacaagatttctcccattaattcccaccattttccaatttacaaaatcagcccttgctcgccccgccccagctcgctcgcaagtcgcaacgcatgccctctcccgagtcctgcccctaccgacggtaccgtccgcgtccgcccgctccgcctcccaaacattccccccaccccctacgcgcgcgagcctaaaaccctagctccgtgccccgatcctccttcccgccc

SEQ ID NO: 390 - DNA, 2000 bp, Zea mays
  source 1..2000: mol_type = genomic DNA
atataccaaaaggtgcttggcaagccagctaaaatatctgtttttaaaactaaagtattacaaatactgcagctcttttgaagtattctaaacttaggtttatacctcagttttctctgtaaaacgcagcgcgcgcatctctcccgcgtgcaaaaaatactttgcttctaaacacctttatgtattcaatactgtggtattataaaactgtagtattttaaactgtggtattgtcatgactaaagtatattgtagtatttcaaaaaccgtggtttccaaaaactttgttcccaaacagggcctaaatgcagatgtggaggagagagaataagtaggttgtaaatttatagtcaatacaagaactaagaaacttcgtggacaagacatgttggatcgtacagtagtagtgtagagcgaacaatataaaagataggtggaaaagatttttaaagccaatagtcagctatattattaaccttgttctaatggttgaatctttttttctcattagtaagcatcgagattttttcagcattggcatttcagcctcactatggctagtacttgcaggacacccactttttaaaacttttgagacctagtttgagtactctagtattggagtggtttggagggattaaagagtgtataaatctccaatagattaaaaactcttataatacatctcaatccacaggcccgggccaaaggcatgtgcaagcaattcgcccgaacagggcccatgaaattatggggccccacaaaatttttcctctagtagactatctagtacatatccgtctgctggttgcgttcatgcatgtgacaactgacattgtgactgtgtgagtccctcactcctcaaatcatgtcgttcccaattcgctttggtctctgctgggttgctcctaattctcaatcacaattcccctgacatcaagcctgcaagatcgctgggcggctgctgcttgccggcccctgtccaagtgcccctaggacctaatttgcactgcacagcaccaagaagtacaacaccaaggcactcatcaaggcgagagaagcaggtaattgctcaagatcatctattcataattcatctaatgcatgtaggagtttagctacaggctctagcaatttgttattgtttataagacatcatattatcaaaagcataagaagaaacaaaaaaaaattgaaattgaacttagtattgttattaagagttatattattctataggctttattttagtttttttttacagggccacaagtttttctagccctgccctgtcaatccacttcaacccctctcgttactagagtatccaaaataggcctatatatggctgcatactcttaatagtaatctattgtatctactgattcgaattacatcatccatatcaattatgtcgaagcatacatactgattgtatccatatcaattacagtatgtcgaagcatacatactgattgtatccatatctaacgcagaacacacgatattttcggaatttcggtgtctgctagctgcttcggttgtttggaggctggtgaacaaccgggtgttgtcgggtcgtcacaaagcaccccgaatgggcggtagagggtagacccctttctgcctattctattcaaatcccagacagagcaacattggtagttatgcaacccctccaaccccaactgttttgcatcagcctaagggcccgttcggttgacggggaatagaaggccggaattgttccggtccggattgtttctctaatttgtataagttttgatcaacaggaataattcttggttcaatccagcagaaacgaacgggccctaaccgatcttgacagcaagctgaagaagcttccaggggctccactgctatataaacactgcccccagagaccccctcttctcaagtcacaacaaacaccaccatccctttgctcagagcatcacactccctctctctcgcgcgcgctcacaagcacgtcgtcaacc

SEQ ID NO: 391 - DNA, 2000 bp, Zea mays
  source 1..2000: mol_type = genomic DNA
cgacttattatatgtgctatgttttccatgcaatcataaataataaaaaaacaaagcaagtcgaaaatatgtgaattataaatgtaaaaacaatataattcactatcaagtctgattttttcataataaaaaaagacaaatatgtaaaattacatataacatcagtgggtctaataatttaaatatagactcataacactgatgcagaattacgaaaaacgcagtgtttaaaaacgtaaaactgcagaaaataataaacaggccatctaaggaccaatttggccacatggtggcggcccaggcgccaccaggccgaggcggcccacgcggccagcctctaggccggggcggcccacgcggccagccaccaaaccgggacggcccaggcgccagccaaaacaggcggcccacaggccaagctaggcggcccacgagccgaccagagccagcgcgcccaaagggagaggcggaaaccctagccgccccatgctgtttggctgccgccgtcagggcagttgcccagccgccgcctcggtccctaggcgcgagcccctgcgctgtggccatgccgagcagatccggtcgcgtcctcgtcgcgccaggagaaggaactcgcgctgggagcccacacgacgccggagtagatggccggcgagcagagccgatggcggggctgttgcacccgtgggccggccgcgcccgaggaggaacgccggggctcaccgaggcccgcgctgccatggccaggggccgccgtgcgaccgcggtcggagccgcctccgcggccaggccccaccgcgctccccgcgcctggtcggagccaccgaggtccgcgccggcgagccgagccaccggcaccgaggggcccgcccgcccctgccggggtcgaggccggtcgtgctgccgccaggccgccgagcaccccgtggggccgcaccgagcccgcccttgcgccgaagcgccagcagtgctcgcgcccgcgccaggaggccgagcaaagctctcgtccgcgccatggccgcggtggccgtcgccgcgccaggaggccgaatagcgctcgcagccgcgccatgggcgcagtggccgtgatggccctagcgacgtccgactccgatggtgatgtgagtggtagtaaattcgaaatagaaccataggcatcgtaccttctacttctttcaccaacagcgatcacttgttccctctaacatgaaaaaaaaattctctgatttcttgagacagtgctgataacgtgttgtaactcagtggaaaaatcagtggagagagaattaacaaatgacagaactatcgtctttattgcagagtgtcatgtatttatacaggggatacaaagtctcccaatgggtgtgtcccttgggagtatctgccagttgatcacaggacaatattttgtaacaagcctaacataccgaaagaaggccggaggatgttctgacgtggcacttggagaagtctgacagttttttttcagtcagaagtgcctactggatattcttcaccagttcaccactgactgtaatcttttgtctggttaataaatttctctttacctgaaaaaagtacatcatccgtatcatgtcaacgcacactgattactatccgggtttcgtgtggcaggtctacagtcacagaacacgcgatccttctgttcggttgtttggaggctgttgaacaaccggctgtcaggtcgtcacaaagtacccgggcgggcaatagacgctccctttttgcagattctccggaacaagatcacagacagatcaacattggtagttatgcaacccctccaaccgcaactgtttttgcatcagcctctcctaccttgtctagtactagtagcaagttcaagcaagcctccacggctccactgctatataaacagtactgcccccagacccctctctactcaaatcacaaaccccgctacctcttaactcttcacacgcacaccgtctctcagtctcagacccacgtcgtcaacc

SEQ ID NO: 392 - DNA, 2000 bp, Zea mays
  source 1..2000: mol_type = genomic DNA
ttgatttttctggcgccaaggatggattttaaatccttttatatttatcttttatttttgtaagacttccgctatgtaataagtactctgattatattgtgacatttatctctatacattctgttattatatatgttgtcttcttcgacgcatgtatgagatgcacccggctttgtcccttaaagcccgggtgtgacagtacgtgttggttacatgcttcgtgtagcgttttttatttgcgttacgataatagttcatctcaaatcactgactattttagttttatactgaagttttaaacacatgtaattctggctaagcttacataaaattttaatcttagcacgaacttaatcaatatttacttatataatcggagaaagcatatatgctactccctctgtcccaaaatatagttctttttggccaacttttttctgttcatattcattcaaatgataatgaatatatatatatatatatatatatatatatatatatatatatatatatatatatgcaaactgcattcatatataaacccatatattaattaatgaatatatgattactctaaaacaaattatatttgaggttggagggagtatgtttttggaggagatataatgattttggttggccaatttcagaacgaaaaagaccgcaagagttttgcagtaattgatctcacgtaaaagagagctcaatttctgtatgaatcggaaatattactcgtatagaggtctagttgattatggctctaagtagggcatgtacaatacatattaatgtaaggtgtcttgagtaaatattactctcatagtggtcgggtgagtatggctccaagcaagatatgcacgatgcgtattaatgtatcgtgactgggtgtaaatgtaaaaaaacgaagacaccatgtgtttatgaagacacacctcagactaggtttgcaaagcccaatacatagcttcactagtataacccaagtaaagagtcatatcttaaagaatttttattaaataagacataaggtttagattcatctcatttgtcttagttgtatcttctacttaaaagcacaccatcgtgttagagttgtacatgcctccctcaggataccttgtcttaaaaatatctaagcacagcaccccgataggcgatagaccaatagaccatacctaaccggctaaccatgaagcaactgtccgcccttgacccacgacacgagtgcagggagggagagaggaggagacgttgaccgagttgcgcgagcaatcagcaataactaatggtcaacaccggaaagcgggcgaacaacaccggggcaacgcaaaggcggccgccacaggtttcagccgcgcgaggcgatggacgcatcgttggtaggaacgttctagcgggcaccgtatagtgtccatcgccattaaattccgtcgacctcggcgcgcctgctgctagcgcgacgcggccagtcacgcacgcagccgccttcttcgcccacgcagctcttgtgttccatcttccatggacaccgtacccagccagccatcccatcatcatttcacacttgacgcacgccacgcggctgggtatgcggccataaaataggaaccccctgtttgttgcgagttaggtgatcacctcgatctcccgcgcttattttccccgccaccctgctctgctctgcaagcctccctgctaaataatcctaccgctccgcagccgcaggtgcgtgcgtggtggttgacggccgcttacccgcaccggcgccatgcgcgcgcgcggctaggtggtcgaggtcaagccaaacgctgcccaccgcctctgcctcgcatatatcctcgcgcacgttctttgctcgtctcgcactcgcttccttcgacggactcatcgccgatcacaccaggctagctagcccacccacagtcgtagggccaggaccgataggaggagctcggtttttccgaccaggaccgccgccgccacacccgaagaagccgacg

SEQ ID NO: 393 - DNA, 2000 bp, Zea mays
  source 1..2000: mol_type = genomic DNA
ggatgaaaacattcaacgtttaatttttagttgcttaacgatgaagtatttatgtagtttaacttatggtgttggagcatcttgtagaccacaaactgactatgcattcaatgtgcaaattaggtaagaaacaatacatcttttgtgggtattataatatgtgaaacaacatcctgacattgtcatcaaatcatcatttatttttttgccaaggacaatagcagtcaccaatattggatgttgcaatgagcgtactggactctggagactagataactttgttccccctatgtggaacacactcataacatatggcaaaagaagcatatctagccagaattgaaaggagtccacaaggaatttacatccaagctaaacatttggcttcctcacacccactagaccagagacttaactatcatattactacttcattgaaattgtagggtctgtgttgaggaaaattttctagacaaaatagctagtgtataactgttggagggaaattattacacatctcaatctagtactgtgaatttgactaatcctgactgatagcatgcgtcaagtaaaaccaagctatctcatctgcatagtcccactaacacatgattctacaaaatccctatcctccttcatccatactactacaaccaaactactgcttgctgcacaaacaaaactaagaaaagcatatccaatttacggtgtctgctaatgagctacataaccactctactaaaaagtactaaaaaggattaaggtccgaaaagacgggaggaaggatgcgtaaccctcgggggcgggagcaaagtcgaggaccgtggttactcctcagttgcgggtgcgtcgcagaagcaaatagggaatggggcgacgggcaagggcggcaacacgatggaaaggagacgagaaattttagaattatagagagacgaggttctagggttctcaaggtctagttatggcgagctgcaccttaataaataatattacattatatagtgatttaataatatataaatgtgacaaatataatcagtcttcaacattataagtaaaatcgtccaatattcattattattctatagtttgattaatttaacatagcccatgaactagaacgagctggatcggctcgctagacaacaagctcgaaaacctacatcggcttggttcactcgagactcgctagacaacgagctcgaaggcctagatttttttttccagccctagccgccgtaggtttgtgccgcgcgcggcgagcccggcgatggccgatggatgcgtcgttggcgagtctggcactggcgggaacgttctagcgggcaccgtcagtggctatcatcgcctttaaattccgtcgacctcgcggcgcgacgcggtcagtcacgcaaccacgcgccttctgctctgttccatggacacccagccatctcatcgtttcacacgaaggcaacagttgacaaacgccgcgaagccgcgtggctgggtagcgcgggcaatagatgggaatcgtggtcaattagcccatcagtttactcggccagttgcttatagtataatacaatcaggcctctgtttgttgcgagttaggtgatcacctcgatctcccgcgcttattctgcgcgccaccctgctgcttctgcacgcacgttacgtaatcccattcccaggcgcagccctctccctgcaagtcctaccgctccgcggccgcaggtgcggggtggttgacggccgcttacccgcaccggcgccatgcgcgcgcgctaggtggtcgaggtcaagccaaacgctgcccaccgcctctgcctcccataacccatataaccctcgtccacgtcctttgctcgactcgcaaaaacttgcttccttcgacggccgcatcagtcctccacgtacgtcccggcacgtcgatcacggcaaaagctagccagcgcacaggacctgcggaggagctcggttttcgatcagggtcaataatcaccacgccgacgctg

SEQ ID NO: 394 - DNA, 2000 bp, Zea mays
  source 1..2000: mol_type = genomic DNA
aacccggtcaattatcaacctctaagcaccttttgaccggtaaaacaaaaacctattgttatacctttgccttgagcattcaattccatctccttaaatgatgaacaatgggcatccataagtgtagccaaccatgataccttttaccatttgtccatagcatgaagttcctctatcacactagttgagcatctcaatatcaccaagccacatcaccaccatggctaaaataactcacactagtgtacctgtggactaatcacctgtgtatctcaacataaacacttattagtccatataagttgtcaatcaattaccaaaaccaaacagggtctcacagatgaccactgcaaaaagggtgtacccctagactgcagaatttaccggtaaaccccgagcaattccaacaagttactcggggctatatctagcagatgcgcttgcgcgcacctaaaaaaactggttcaggacgaaagcatgtacgcaactccaaggagtttgcataaaggcttaagggttgctgtcgggcacctaggaacggggtaccaaaagagagccccacgaaactcaccaagaatgacccatctgaccaagtcccccactgagcaagtccgcgaggcgtagcgggcgaccaggtcccccgcgcgagcaagcctacgaggcgtagcgagcgactaggtccccctgtcgagcaagtctaatcgttgagccagagctgcaagcatacatcgaccacgatagtgtgtgacgctcggagcccaggtgataagacatagatataactttcctctcagggacggtctcagcaccagacaagatagggtgtcatgtctgatcccataatggcggaaggaaccatgtcgtgtcaatcgagtcataggcttacgccatgggacccgccacgcatcaccacgaggacgtcagccacaaacccatcgcaaggacaggaacaataggcggcactatgtccaggagcgctattttgtatgaccatgagaaggggaccacgacaacgaatgaaagacttcttctctctttatttcgtctctccccctctctcctcctatccctctctaaagatagagcaatgtaaggtccgatccttaggatataaaagggaagggtcctctttctactcgtgatgatggtggtccagcctacggaaatagccctgctggaccgcgacttcacatggtgggccttaactcagtgttgggctagtcgtccggtaatcttatggttgcgaagagttatagggtctcaccttgacctagcataaccggaccgacactgagtatgataataatgtgatgtcaatcatctgcctcttttttttggcttgatgtgcatttaattttggtcttttgttgcttgttcgatatatgttggatgggaagtaataggcaacatatttctcaccgactattgctaccaggtggatgttggagcaatgcatgattctagtacgtgaaaggtgaaatgattgacgaaataaatttgctaaagtatgggcaacctcatcggcagtccgcactaacaagaaaagaaagcgagagttcttgaaggaaacacacgcactgaattgtctatagcaaaaaccattgggcaatacctacagctacagcgctccttgctttccgttacaattcctgaaacagaaggcaccaaccccagttagattagttcactgaagtgaggaacatttgcctattcttgttaggcagaatgggcaagaagtatggacaagagcaacgcattttatttgtccttgatgaattcaaaatcttgccagacgtgggcgcagtgcaaagcctcaccacacggctcgtgtgcagaggagagagatatatacacgactacacgagggcgccaaacacatttcgcaactcaccaagaacagcgcaatttcttaatcgcagagcctaaacccggtcctcctaattatatcgccacagtgctgtcacaaccaggcgcgatcacaaagcttaaaacgcaccggc

SEQ ID NO: 395 - DNA, 2000 bp, Zea mays
  source 1..2000: mol_type = genomic DNA
ttcatattgtggttatgacctaagtccgaaggtacctgttcatgtatcatactccagaaacattgctaaatcatgtttttgaggaccttcggaagccgaaggcccccaacatcacccttatctaaattttcactggcaacaaaagccttaccatcatcttcagatttgttcctgtttgaagatttaccgtttcttttttctttgttatttagcttccagcaatcctcaataaaatgattagttttcttacagtacttccagaacttatcatttcatttggacttagaacgtcctttgcttttccatctattttcaggcttcgaacttttattaccatccctaccccgatctgtgaatgcctcgcccttggaggacgattcttccgagcgaaacatcagtttcatcttctctttctgcgcaagagcctcacaaacttcttgtagggttagttcatcatgactgtatagaatcgtatctcggaaatttgcaaagatgtaggtagcgagcataatagaattaaatctagatcctcatcatcatactcaacctccatggacttcagatcagcgactatctccttggaggctgctaagtgatccaatgcacaaccgccttcctgcagcttgttgtaaacaactttatcttcatgcgcatcttgctagttagatcatttgacatacagatcgattacagcttcaaccacaacgcaacagcgttattttccgccaaaacctcatgcgggatattgttagacagataaaggtgaatatgtgccagcgccgctatgagagaatcgcccgcatgttgacctgccacaatgagaaccttgtgtcgtgatctaacattggtatatcatacttcacagacgccatgccgacgatcaatctgttaaccaaagctttgatactgcttctcagcagaatcggcaggaaaaaatgaagtagatcaacaaacaaaccacagagcacgacacacaaatttacatggaaaacccttcaatacaaagggaaaaaggcgaaaccttcactataatgtggagtgtttatataacaccgttcttgtggcttacaagaggagtaatattgattatgtagctgaaactctaattagggtcaataatatataccgtggggatccgtcccccgcaccccctggcgtgcagcgctgctggcctatcggccagttggcgtcgctacgctgcagcccaagcctccggcgacgggtatccgcttcgcttgtcaacacaaactcttatacagaatttggatcaccaactcaacagtaaacgagacacgataacagtgataacaatgtaatgtcaatcatctctgttattttgttgtcttttgtgaatttgattttagccttttctcgcttgttcgatacgttggatgggaagtaatatgcaacagatttctcaccaactattgctacctggatgatgttggagcaacgcatggttctagcacgtgaaaggtgaaatatttgacgaaattgatttgctaaagtacgggcaaccttctcggtagttcgcactaacaagaaagaaagcgagagttcttgaaggaaacatgcgcactgaattttctatagccaaaaccactgtccaatacctacagcgcttccttgctttctgttacattgttgaacaaaaactaccaaccccgcagttagattagtcactactagtacgtccactgaagtgagggaacattgcctattcttgttgggcagaatgggcaagaagtatgaacaagagcaacgcgttctatttgtcctcgatgaattcaaaatcttgcgagacatgggcacagaggaaagcctctcaacacggctcgcgtgcagaggatatatatacacaagggcgccaaatacatttcccaactccaacaagaacagcgccatttcttaatcgcagcgcctaaacccagcccctcctaattatatcaccgcacagctgctagcaccaggtgcgatttacaggcttaaaacgcaccggc

SEQ ID NO: 396 - DNA, 2000 bp, Zea mays
  source 1..2000: mol_type = genomic DNA
gcctgcgcactaatacaccggccagctcatgccgattccatccccggccggttagagttttggcgtaacaagtttccgacctttgaaatctgtgtacccgcctttaaaatttcagttgtcatactggttttaatttaatttcagacgactgaatgaaaaaaacaactgattatagataccaccttcgtcgtagctgtgttttaaatagccggatacatagtttatcctcacccttctcaaacttgcaaatatcaggataaatcacaatataatgaaacataacttttcactgataaaaatgatatatcgggatatatcgtccatgcagttatttaaaaccttgcttcatatggagtcaaatctatatgattcacttgattagcactacaccaaaatcatacacttcctacggttttttaacttcctacagcttttatataaaaccgtaggaaatacataacttccgagaggcaactgatacctctaggaaataaacataacttcctacagttttttataaaagctgtcggaagttacaaaaccgtaggaacttaactaacttcctacggctggctctaggaagttaggtttcatccgttcacaagccaataggaagttagtcagctgacggcgctgacggcgtgaaactactaacttccgagaatctactaacttccgagaggtttattaagctgtaagaagttaggtaacttcctagagccctctaggaagttaagctaacttccgacaaaaaaatttcgagagccaaacttccgacgggatgacttaacttccgagagtttcgctaacttcctaaagtttaggcctaacttcctagggtttaggctctagaaagtttactattttggtgtagtgtagatattgtgcggagtcatttcatcttcaaacaattcaactaaaaaacttaagcttataggaagagatttacgattcacttatattttaacagtataatcatattattagcttaactcaagttaattaatttgtagagctagaaagatcattatatttttggaactaatactgtggagtttcacacaaaacagtagtatttctttttacctactcccaataatgtgccttcaaatgggaacactacactacatatatatggatccacatcgccaaaaactagacatcagtcagacgctaacgctatccaccacacattgccttttttgtatccagatatacatatgtccaggccggctagctgtacttaatttgccatctatcaaatcatatcacagattaaaaaacactctaataccaaagataggcatcatcactgaaaactatccatctcatgtgccatgcatccacttactaataatctctccaaaaaaaagtatgcaaatttcctgagagagagagagagacagagacagaccacatttagcccaagtacacactgactttagtgattcactctacggccggatgccatccagtgccaggctacctgcaaacaaacacgcgccttgggcgattccatgtgcaagtgtactttgtttacagaaaagacagggggctcttattatgaaactaatagccaaccttttccccccttgagtgctgagatttgtaggggccaaccatcaagcaggaggtgattgcaaccaaacaaatactatcccacacattgacttcctaccccttcccttcgtctctccctatcatcctctctctgcagctcagctagcctcactgtcgccctcgtcagtcttatatattttatgtgctctcttgttcccttgtgtgatgtctcctcttcctctccctatccttgctttctgtgcctctcaacaaagggcagtgttccttgctatgtcatctagctagatagcacagagcaagctgcctgggcaggcagctagaaaattaacaacaaaaaaaaaaggtcaggagcagtgggatttggtagcttgctgttgcttttggcttcgtctccgggcacatctcactgctgaaacctc

SEQ ID NO: 397 - DNA, 2000 bp, Zea mays
  source 1..2000: mol_type = genomic DNA
tatcttatgaccgagaagaggatagatatttgagcttatataaatttgagataggcacttcttaataatttgttgtggctagacaataacacaataaggcttcattttgctgcgtcattgtttttaataattaaagtgacatcaattgtctaggtttgggtggaccttttaactacctccagaatattctgattaaaataaatttatgctgattacttcacgtttcttgctagttgtttacgtgcatttgttccttgcacatcgtgatccgggtagctgagattttgtaggccttagacatcgactttgttttggtgtatttttattttttgtttgcctccaatatgattgtattttgattggttttaggtcattccgtcttaactctagactttcgaataaattccatgtaaaaggttcttttaactttaataactttgcccttctgagtacctctagagtgtgagatatattccacttaaaaggtcttttacagatttatgtatagtctgctaggtcacactgtatacatattcatgtttcactagggtttacttttccagtgctattggtacttcattttttctggcttcatattaaagtacatataatggtttcactattagccagaactaatatagtcgtcttcacctatttcgcaatggcttctatgtcttttgtggggcgatgaccatacccatgcttgaatattaagaaactttagtctcgaaggtttcagattaccttccatggagaaggcttttctgacttggtactgttgttttcgaattgcttgtgtttttagtagccagttatcctttcttaacccaatcatgcatttaaccctatcacatggtactgttgttttggtgtattttggtttttagggtttagggttgaaaaggccagcaacaattctattgcttggcttctttcctcaaccattgcactacaatccttctgtcactaggatcaacactacaagacaaatggcaccgtctatacttaaccaaaataggacggttgcagtcctacatcccgttcctactgagtccccgtaagtacactgtacacatttcacaatcatatctatatgtgtggacaaccaaatctgaactcacttttaatgtagtttcgtgctatttaatgacattgaaaagattggcttaccaaaagtaaagagtatcgtagtgggaatagttgttaagttccctagacgtgatgatagccaacatttcattctacaggacataactataagtcacttcatcaaacattcaaaccaaaatatgaaagcatcaacatagttctcttactcatacgacaagtattttgaaatgactagggataaaaaatagaagcaatttcctaccacaataatgtccaatgatttaatgccttactccaacaaggatctaacatacattatacggagtggcgttctgtgtaaactcggggcgtggcaattttggaattttggacatagcctggaattgacgttggcaacccatactatcatggagccattcagttcccaccgtatccaaaacatcttatgccatttcatgaggtcatccaacgaggtttgtaggtaacgatccttctttctaaatgaattctacttataccgacttaaccatataatttattcaaatttaacccagcacatgagaatggctcagatgtaataagaatagttattcatttggtgccattagagcacgtcggaggaaaggttgagctagccccactgatgccgccgctctgttctgattaattaaggtcgagtactatcgcatgtatgtctagtctttcttcaaaaaatatatatagcattacctagctatgtggatgtgccgtccatagttgttgtctctccagcccccatctcagttctgtcatctatcggcgagcagatttgagaccaaggctaggaggcacggtagaaaagacagcagcaaatcacaaagaaagcccactggtagcgtaggtcaacagac

SEQ ID NO: 398 - DNA, 2000 bp, Zea mays
  source 1..2000: mol_type = genomic DNA
tgcatgtgaattgacagtgtaacttagggggtgtttggtttctagggactaatgtttagtccattcattttgttccattttagtatataaattgacaaatatagaaactaaaatagagttttagtttctatatttgataattttgtaactaaagtggaataaaatgtagggactaaaaattagtccctagaaaccaaacacccccttaataaactgctgttgtcgatgcgttattggtgtgcagacacgctgacttctgcttgcattgtaatatgtaggccgtcattgaacataataatgtttgacaactagagcgcgatttttagggtttgtttgtttttccttgctaaagtttagcacagcatattttgttaaagtttagctactaaaaaacaaacagagtgataaaagtattgtgctaaagtttagtgtccattctctttaaaccaaaattttggagtgcctctttaaaccaatcaatcaagagaatttatgatagtacatttaagaatcatatgtaccaaaggctcccgtttggttgccgtgcattttaagaatctcacccgcgcacataacccaagaaaatgtggttgaaacaatcgagacactaattcgatttttcaagtataagagacgactaagagattatatagtatatccctgaaactctagatcatcaatgcagctagagacaatatgtatagaaggtactatacagactcttcacaaagagctaatttcttatatttttttacttagctccttagagactctaaaaacccatattaaatgggttgccctaaccgtgaatactctctttatggcgtgttatgcgagatgaaaattttgtgacgtttggttcacaattacattctataagccgaattcttagagcatcttcaatagttatgcaaacaactcactaaatatgaatttaagaaatttttggtgaaaactcttcttcaacagttatgtaaaatatgtcctcaaatttacaaactcactacaaaactcaatttcattcctacatttaccaaccttgttgggactccctaaatcaatgttggttctaaatccatctggaaaccatattccggccaccgttttgcgtcgtcccaccatcctgttgaccacaaatctatctccaatgccccgtgctgtctttatatcatcgctacaaacttctggtcttccatcgataacttcgaccttccaagacgttatggaaggttgctgatgtgctagctcaattaaaaatagaaaacatggtcacttttttgttgacgtggacaattttaaaaattagccaccaataaatagagaaccatacacatttttttacttcttaaagtgatttagcaactttttaaatctataatttaacataataaatttacataactataactattagagatactcttattcttcgtgcgaaccaaacgccccttatataaataaaacatcatccagccaccccctggccacaaggctcagcctgtcagacacgcctcctagagttagactcttagaccaactctagcaagactccgtatccgactccgcatccccattttgcgcggtctgaggcactgttgcgcgctccagcagactccgcatccctctccgcaaaatggacgccgtgtccctgcgctccccatttccacactttctctctcctctccgcaactctctgcgtgcgcgcgcgcctgctggcgggacccaggtgtcatagactgcatgcggagtgggatggggagtgttgctggaaacggagccggatacggagaggagagagaatgtgtcggccgcgcgttttagggatacggagtcgcacactgctggagttggtcttagtccatagagactagagagagcgtgcctgctgcgccgccgccctaacgccatccaagccacacggtagagacagagagagagagagagctgccgaccgacctcaccgccgcgccgcgtgacacgagcggccaatagagacggag

SEQ ID NO: 399 - DNA, 2000 bp, Zea mays
  source 1..2000: mol_type = genomic DNA
tggaaacatgaactgtaaagtgctcagatgtatttatataagagtcctatacatagatcgaaccgtaaagtgctcagatgtatttaagttccatttacaaatatcattttcagcatataactgaacatgaatgagacgcgccactaggttatgccaggagatgaggttgggaccgactaaagctatacggaaaaaaaggtttagcagtactgaacctaatatcgtagaaactgtggcacttttctgtctcacaatctgataaagagtcggatattgagtcataaaaggttgcttctctagccacttatctttccaaaacctaatttattccacattttttaggatgaactttcctatagattcaacaaggtatcattccccttcattaaacccgaccaaaattgtgaaccaccaggtctatgtgtcactttcgtcagaggatatctatataaatacttattatgtaacaactgttgccacaaaccaacctcgttaatcaatttaaaaagacatttgcttagcaaacatttatttttagaccctgtatttttgttccgttttcgtccctacatagaatgtcccatctgtcaagtttatatttcttcttatgattctcgccttgccaaaagaacccggaacaaaaaaatcaattctcgcgagaacccctctaggtaggtatctcaaaaaaaatacaacataaacattgctattgctggtcagcaccgagtttattaaaactacactgcctcccatatacatatgttttcctttccaaccactaagtttcttctcgaatttcgtctctattattttccaatcactactccttaacttgcagtaatgcattggaatccccttgcaaccaaacaaaagatgatattgttcctccatttcagcagcctaaccaaaacaaaataacactgttttgtgatagttaattttaagacccgaaacttgctcgaaaactaggaggaataatttcatatttttttggctttctccaaatcatgctccaaaaacaaaagtgtgtcatccgcgtattgcagaatagacaatccatcctccactaaacgctaaaccccgctagaatttttagcccaacctttagggctagtttggtagtcataaaactggaggcgattggaggggtctagaatccccttcttattcaatttaaataagaagtggattctagcccctccaatctcttccgattttgtgactctcaaattagtcctttatattgtctcacatgtcgaattttggcctgccatttctactggggaaaaaacacatgaaaatgcaccgcatgcctgcagatagggcacaccaataataaagcactacttgtattctagcttgtgagatgtgaccaagtacaaccacgacggattgactaaactcgcaagtagtagtaaaacatactgccatactggtcggtcaacacaggagtattgtagaagcaaaaacatttttcaaaacaaacggacacggcgcaatacgtacggcgacagggacgaacaataatacggtcggagcgacggggccggggacgggggacggctcggcaaaatggtcgcacctggcccacgcgcactatcccagggacgggacccaaacgcacctggcgtgggtgcctgctgcctggtggctcaaggtcaagctgccgctataaaacgcccctgcgctccctgcagctgcagcctcgcttgctgttgctggccttgtcgcgagtaattgccagccatcttctgctagagaaaacacacgcccgcccccgtggtccgtctgctgccgcggccccgcacagaaactcacaccgcagctgcagctgcagccgcggcccgccagcaaccagtccgatccccgccgcggctacctgccggttcccctctcccttcccggcgtgcggccgcgcgcgtgtttgatcgatcggagccagacagagcgcggaaacggcctgagaattctgttggagcagcagcactgccacagctagc

SEQ ID NO: 400 - DNA, 2000 bp, Zea mays
  source 1..2000: mol_type = genomic DNA
cggcaaagagttatttgctgagtcttttttacgggcactcaacaaatactttgccgagtataaaaaaacactcggcaaaaaattatttaccgagtcttttttacagaactcaacaaatactttgtcgagtataaaaaaacactcggcaaacaaaattactcggcaaaaagagaagctctttgccaagtgttattttttaccgagcgtttatgtttggcactcagcaaaaagaaaagctctttacaatgttttcttttacctagcgttttatttttgacactcgataaagagtttattgtcaagtgtctgaaaaaaaaatttagcaaattacttgacactcgacaaagacttgtttttcggtagtgtgtacatgtgttccagacctctgacgggaagataagcaaggaccgtacgaccatgtcaacgatatgtatgcaagtcctgcacgtagtatagattcatccgtacattgaatgatgatggccggtacatactggagaaacttgtccgtctcactgccacttatccgaaaagccgattcaatttaacgagtcaagcggttgtttctacgagtggacagactgcattattcaggatcagatcaaaattcctcgcagtttgttgggccgtacatatcagcgtcggctacatagcaaataggttcaattagtttgagaagtacgtactatactgaaaaatatatacagagagcatgtttgagtatcttgatggtcgtcagatcactcacagaagcaaagggctagcttgtggacattgttgtcgatttgaccaagcgcacttcttgtatatacgtagctttcagtttcagccgtatgtataatgtatttatgtttactcaatggatgtgagaagatagctagatggccggccggtgccgggggtacctagcaggacggtccacacagaggcgtgcgtttcatgcctgttaaacatcctgcagggcaatacttcttcaaattaagccacaaaataataatgcacaacacgacaattcagtactactactgtagctgcttggcagtcgaacttttctcgtggttttcttgacattttttttttgactgtggaaacaagagttccgacttttcgcatcacatgcgtacaaccattacatgtcaaatattgctttaatgaacagtaaccaaataaaactaactcgacgaaaccaaataacatggctatggaaaacactaggcacactcaaatcttgcatttgatcgtcatccatgaaacgcaaagatttccatcgccaccacttctagagcttgacacacatcgagaatttgttgatgtacatcctccttttgtaggagtctacagaacctgaaccagtggatacctctgaagatgacctgcacaattgatggtattggtttttgattaaatgtcacctcatttcgagtaagccaaatagaccaaaataaagctgatattccagtaaatagtaactttttgtatactatactacaattacttgcccaagacccgataatctcaatttcgtgtttttcttgacatataaggactagtttgagaatctcaattttttaagaaatttctattttcccaaagaaaattagtttattttcttataggaaaatgtccttaggaaattgaggttcccaaactaattaacgtagatgccgtcgacgattggagactcggacggtgacagcttggcctgtttgtttgctgtctaatttgtcatactttaactaacttagttctttattttggacggctagtcttagtaaagtgtgacatagtgcacgcttggtcaacttgttcggagcgcgctagctcgttggcggcttggagaggcgaccaaacatatccagtaatcccgctccctgctcccctcccatcagcattctgtcgcccgcctccgtccctatacaccctataaatagctcgcgccggccggcagtgcaggtcacgacaggacgacgtacgagagggcgcgcgccgatcgaggcgat

SEQ ID NO: 401 - DNA, 2000 bp, Zea mays
  source 1..2000: mol_type = genomic DNA
tgcctctgcgaacgtggggaacgacctgtgcatcttgaggatggacaccttgtggcggaacttaccaccgaggccgcgaaggagcgtgagcaccatctgccgatcgccgatgggatcgccgaactcggcaagggaagccgccatcgattcgagctggcggcagcagtcggtgatgctcagggactcttggcggaagttgcggaattttgtttcgagcagaagcgcccgagactccctctggccgaggaactcgtcctcgaggtagcaccacgccccgcgagcggggccctgccgcatcatcagagattgctgcaggtcgccggaaacggtgctgtagatccatgtcaggacacaacaatcggcttgaacccatgccgggcgcgatgggaacgcttcatcttcaaggacgtgacgagtcagggcatatttgccaaggacagtgaggaacatgccacaccacttggtgtaggtatttgtcgcctgatcgagaaggacagggatgagcgccttcatgttgacgacgacagtggcctgcgcccagagggcctcatgggcatgctcatacgcgtccagagcggcagcacggaggcggccttcctcggcgcggcgagcgtcttcggcacggcgtgctgcagcctcagccgtagggcgctggtcctcggcggcagcgtcgtggtcgtccgccatcgggagggagacgcgacggctgggcagccaatctggagccgctgcagactggacgagagggaggcgcgacggagattagcgcggtctggaggctcgactgcgcccggccagagggaacgaccgcgcgatctggacgggaatcagccgagggagacgcgacggggatccgccgatctggagccgcgtcggatcagcgagcgtggcgggcgagtggatcagcggccgcacccggcagcaacagcgacggggcgggcgatcgaacggacggcgtaggcgatgggatcagcgacgctccaggcgacgaggtctgcaggggcggcgatcggatcggcgacggcgcggtcttgggttgcggaagtgtggtggatcggaacttaattgtgggaatgacttgattctattccactgcaatgtgtgcgtatacataggagagaccggggttgctcacaaggcaaccgcacaggcgtacaagccaatcaagggcagcctacaatcaagggtgactaccataattagactttctataattacaatagtctaacatttacaatacttcagttttcaaaacagcgattttagctagcttgtcaaacaccattatatatataatactgtagtatttaagaatactgcattattttttcaaaaatgtaaaaaaaaaaaagcttcacccccaaacacccaatagatgtgttttcttacggactgtcagtggccactggctacatacatgcaagattagtacacgtagtacagctcaaacaatagaatagtaaactgtgcaacttatcctatgcatgtgagatcccggtatatatatcgtgtttagccatctatacaagcagagagatcagatcacatatataaacaagctacacgaactgaagcaacgacaagtcggtctatggtgcacaaagaccaggttcaggaaatggtcggctgacactgctgatggagattctaatccaagagaagaaacaacaattagacagggagaaacccagatcaccaccaccaccaccaccgctgaaacagtattttattactactaccagagcagccgccttttttccatgccaatgccaataatacgcctctcccttttcggggcataaacacaccgcccgcccagcagaccgtcatcgtcgtgactaaccaagtctagctaggccctaatcagcacttgttcgatccaccgctcgctcacaagtgaagagagagccgccgccccagccccagagcagctcagagacctcaagagtcaagaggggagaaataaaggaagacgacgacgacgtacgtacgccatcgcc

SEQ ID NO: 402 - DNA, 2000 bp, Zea mays
  source 1..2000: mol_type = genomic DNA
gtccttggtacctctagtacacatagtacttagcttgtatatatagtaaacaaaaccataataaaacatccagtagctagccttaatttagtccagctctactacttgactaaatatgttattggtcaatacgctgttagctgtttgaaacaggaagcgggtgatcgagccaacgcgatttcaaacctggtgcccccccccccccccccccccccccaagtctagtttcacgggcagcagcagtcgtccagcccatgtacacgacacgacatctgcactgcagcgcgattaaattaaactaatcgctgcacaggatcgacccattgtcatggatgttaggctaggcctgaattgaaagtctctcaaggcacatatatatacacacatggtcccggcagagtcaggggagctgctgcattcttgcgtgctgcaatgcagtgaaaaacatggagtgttcaagttcaaccggccggcgtcgtcgtcaatggccggcggatgatctgatgtcacggcgatcgatataataaactacttgtttggggaaaaaaagggtaggcagggcagcgatagagattagggaaaaggcaggcaggcgacgcgaggcgctgtttgtttaattcaaagggttgttctgtcacgcacatgcacgccaaccaatctggggatcgactagggatcgatctgtatagtacatgcttttgctttggctcgtcttgttccttttgggtgtgtttgcgacgcgtatcgggccggctcggccagctcgtgtggtccaggccaaagttagccggtctcaactgctataacatatcttgtttctgcattgtattaaataagtctggttcaagtgaaccgatgtttgccacacgtaggcagccaggttaagagccacttttgtttcttgagagcagccacgagcagccgaactccaaaaaaacggagcctgtcttcgtttcctgggagccaggctaaagagccacttttgcacgcgcagaaacaagctccaaagcaaggtaggccacacaaacacatgtgttgcatcccgcgagcacagccagagaccgtcaggctaaggtcgcaaacgtgccctttgtaccccattatatcagtcaacagacgcggtggatactactgtccatagatcagccatggattatctatccatcgatttctacttctctgcacatgtgcatgctgtccatcagtgggctgaggttatccagagacagaaattttgacagaaaaatgttgaaactactttatatttttttacttgttgcgaatctataattatatatttggagggagggacaggagatcctagccagtgcatggcagggagctggggccgcgtagtgagatgcaagaacgatgatatggttggagtgtatgtggtgtggattgtgtggagctagcccgccaaccggctcatcagtcatcacacaaagcatcggaacacttttttttaatcctggtgtgagtcttgaaatagtgcagagacttagagactttaatctgatattacttatctagatagataacagacaacatataagtagagtgtgtatgaacctttcacatagaaaaaacaaagagctacggagattgttgtgaacacaccaccatgcatgcgaaccccttcacatcttttgtttgcgtgatctgcttactccctccgtttcgttttagttgtcgctggataatataaaatttaactatctagcgacaactaaaaagaaacagagagagtactaatagatcgattttgttttacaaaatttgccctgtcgcccggcgtgccctgtaccggacccgtaccctctctcgccggcccctgcatgctcagctataaagctcggcggcagcttgcttgggcaggccccatccaatccatcgcgcgcactctcacctgccttccttctgccagctgctgactcatctatcagctcgctcgcacgctgcagaacgaacgaagctgaaggcggcggcggcggctagcc

SEQ ID NO: 403 - DNA, 2000 bp, Zea mays
  source 1..2000: mol_type = genomic DNA
ttagagactttaatctgatattacttatctagatagataacagacaacatataagtagagtgtgtatgaacctttcacatagaaaaaacaaagagctacggagattgttgtgaacacaccaccatgcatgcgaaccccttcacatcttttgtttgcgtgatctgcttactccctccgtttcgttttagttgtcgctggataatataaaatttaactatctagcgacaactaaaaagaaacagagagagtactaatagatcgattttgttttacaaaatttgccctgtcgcccggcgtgccctgtaccggacccgtaccctctctcgccggcccctgcatgctcagctataaagctcggcggcagcttgcttgggcaggccccatccaatccatcgcgcgcactctcacctgccttccttctgccagctgctgactcatctatcagctcgctcgcacgctgcagaacgaacgaagctgaaggcggcggcggcggctagccatggggagggcgccgtgctgcgacaaggcgagcgtgaagaaagggccgtggtcgcccgaggaggatgccaagctcaaggcctacatcgaggagcatggcaccggcggcaactggatcgcgctgccgcagaagattgttggtatgtccatgcagcgcaagatgatgatgatgcgtctcatctatcgatccttctgtgtgttttgctgatgaaattcgtccggtgccctcttttatttggctcttcgtttttcctagcttgtgatccgtgtgctagctagattgctattgtatggtggcatctccatatatattcatccgatttagaaagcaaacttctttcaaaatcaaagatgcatatgtctgctactctgctgcccttaatttgtgcatcgattgagctatagatcctatgcatatgtatatatgtgcccttcaccctcgaaactgaattaaacctcaagagaactttagtatcatatgcgggcatgtctgattcgggtgtgtaaccaccaaacatgtatacctatttaaaatatatgtgtgcgcagttttcgatttgaagcttttatttgacgatgaaaagatgcttgattgctagccagttgttgtttcatcatcgattgatctatatgtttgtcgtggtgtgagagatctatagctagagatagtatcaagctgataattaaagaacaaggccatttcttaaccaattaagaaatacgtacggtaaacctctgataattacatggaacacgccaaaacaaacaacggtaagctaggccttagctaatacgtaagcaggaattatgtgtgtatagttacatctctatacatccgtcccaaaatatagttcttactagctgtcttttttctgtctacgttcgaaaaaatgataatagatatagacatatatacaaactatatttatagattaattaatgaatataagtttaatctaaaacaaattatatatcgggacagagggagtacatattattgtggtatatatacgtggcagtcattttccgtgtatccttttgccttaggatacttacttattaaatgttaatttgatctgagattgattaagtataagtatgagtatgatttgttgttgcagggctgaagagatgtggcaaaagctgcaggctgagatggctcaattatctgcgccgaaacattaagcacggtgacttcacagaagaagaggagcatatcatttgcagcctctacattagcattggaagcaggtaataagaaatcagtgcacaccatttgcaaactgcatcgcatgtcggcatgtgcacagaagaagaggagcatctcatgctgttcattgttcaggtggtccatcattgcagcgcagttgccggggcgaacggacaacgacatcaagaactactggaacaccaagctgaagaagaagctcctcggcaagcgcgcgccatcccggcgcgcgagggcaaaccaggatccctacctcgctgcgggaggcggcaac

SEQ ID NO: 404 - DNA, 2000 bp, Zea mays
  source 1..2000: mol_type = genomic DNA
ggcgagatcgtgtcccttgagtggacagagccttgacctgaattgcgctcatcaggcctttgcagctttgtgctgatgggggttatcagctgagattaggagtcttgggggtacccctaattcactaccggaatcaatcgctttgccgagtgcctgaagcacttggcgaagccttaaaaacactcggcaaaggctttgccgagtgccgtcctgtgccgagtgttcagcactcgataaaggggctctttgccgagagcctaactttaccgagtgcggcactcggcaaagccttctttgtcgagtgcccgacaaaaggcactcggcaaagaatacaacactcggcaaagcctcggattccgggagtgattatggtccccgacactagtataatcaaacgtgagacctatcttacctgctgccttactagtgttaaaagattaggagaaacgtccaaaacaatgtttgtaacaaacaataatgtgacaaaagaaaacaaagactgatagaaatatattggagagaagaaaaatacccataataaccggctctggttatactgtataaaaatgcatttctattacttacgggccggccggccttatatatcatatataggagtaagtcgttgcatgcgctcgtcagcataattgcctcttgcatggcctcggtcgctggtttaaatttacacttgaatttgcagtttgcttgcctgaaataaaaatcctgcattggacatttggaccacacttcgcaatggttgactagtgagaaggggttttgtttttttggtaatcgtagaagaaggggttttgtttttttggtaacagttggtaatcgtatcctgcttaattatgagatcaggctacatatatcagtgtatattatggcatccttataatagatgttttcctcacagatatttgtgcgcaacttgacaaaatactttagagaagcagcaccaccaacaaatgcgtgtcaagagggtcgtcgttcaagttgcatggaccagccgaccagtcatataatagtaacccaggctatataataataaagtggctagtacggcaatgttattcttattagagaagaaaatgtggttttatggtcttcagaaaatgccgtgtctatatatacacacagcacatatatatatatatatatatatatatatatatatatatgctgagaatatttgcatgagatttaaaaatcaattgtgctaatatgcaagttataaagtgacttattaattaagaacggttctaacgttagaggtcgtcgttgttgttgtcgatgtttaattcaccgaactatttttaccgagcgtggcactctattttatcgagtgcatttgattttttaccaagtgtttttggcactcggcaaaaaaaaaagctgtcttcaatagtgaacgtacgctgctaattattagccacagctttagaaattaactaaagcaacatggaacatcatacgacgaaggaattgcgttataaactggccgcaatcatttgcaattaaaatttatacaagtataacgagtcagacacacttaagcaactagcataaaattaagtagattcatgcatgtgatccatataatataacgtggtactatttcactgtaaaaactatagcaactactatatatgtgcgtgtatatattcgcctgccctaatatataggctgtaataatacaagaagataagcaaaagtaatatacgccgtgctctgctgatggactgttttgtagtacggtgacaggaaataaaactaatgttacacatcaaggtcccttcctatataaataaaacaatccggccatccctggccacaaggcttcagccacgccgtcttagtcctagtctctgcagagagcgtcgttcctgctgcgccgccttaacgccatttccaagccactcgactcgagagggagctcggtctgctgccgatcgacttcaccgccgcgagaggcacgggcagctaagagagagagagag

SEQ ID NO: 405 - DNA, 2000 bp, Zea mays
  source 1..2000: mol_type = genomic DNA
ttcttattaatgagttcaaatgcttactcaacatctgatgtccaatggaatggaatattattatttagtagttctattggtggtctgtagataattctagaatggcttatgaacttgctataatatctagttgaggcctaagaagccactcgattacttggttgtagttggtgtaggccactgtcttatagcctggattttgaaggatttgtgctatctagggacttggcccacatgttagcaagatacttgattcgttcgagaacgataaagatgcaggatcttatcagattagtagataagtttgatacccatgtaaatatggtagagagtaagtcataagagaaatctgcatatagtgacaaatataaagagtctttgtaagactcggctaggccaatgtgtatccttatctagcgggagactagataaccttcgtgtaaccgtccaccttcttagacaataaaaggagggacgagacgcccccaagagggtagatcatcagatcataagaaatagccaccaacatacatgatgtagggtattatcaaatattgtgagctcgaacctttctaaatcccagagtcttttgtgcattcaccttcagttcttgcgatccaccccataaattcactaacgaatattcctcgacacctccaagcagtcgatgtgtatcacaatatcatcgatgcgggtggtcgtctcctcggaccgcttgagcaacatcctaaacgccttgtccgctagggctctaggccactgagtttgtcaagcgtctacttcatcatggcttgaaatccttgaaaatttttggtgaggttctccacggaatccaccatctctcattgaagcttagaaggatgctttgcatatgccaacaagagcacaagaaggggaaatgctcacagtttgaaaggctcttatactaattgttatgcagaaacatggttagataaaatttggggaagaaagcagcaacaatggggaagaacaaggatgaacacatgatatctacggccgtttcatttacataaagattttgttcttcgctaatcaccttccttaatcttgcgcacgttttatattctactttgtcgaactgttacatgaccctctaggctaggaatggtaacatgtataaaatcacgggtagaaagtttacaaacccgtacctataagacaagtattaaacttgcgtacgtcacccgtgatagatactccctccgtttctttttattagtcgctggatagtgcaaaattgcactatccagtgactaataaaaagaaacggagggagtacaatattcacccgcaccggctatccttagtcacataaagacacatatatttcaatgcacatgatgcacatacggggtagagagcatgcatgaggaccgtgtggtttgtgagaaataaacttgtgtttttttttcttacagactgtcatattggccactgtggttacgtgtatatgtacaagattagtgcacgtagagctcaaacgatagaataataaacaggccggtgcaatatatcctatgcatgagatcccggtactatatatatatatcgtgtttagtcatcatgtaagcagagatcagaccggatgacataaacaaaccacacgagtaatggaagcaacaagtgtctatggtgcacaaagaccatgttcaggaaaaggtcggctgactgctgatgggagattctaatccaagagaagaaacaacacttagaaagagagaaacccagatcaccaccaccgctcaaacagtattttattactatcagagcagccactttttccatgccaataatgcacatgcacctttcccttttcagggcataaacacaccgcccagatcgttattatcactaaccaagcttaggccctaatcggcgcttttgttcgatccaccacactcgctcacaagagagcccaagctatagagcagctccgagtcgtcagagcctcagaggggagaaagaagaaggcgcaggcc

SEQ ID NO: 406 - DNA, 2000 bp, Zea mays
  source 1..2000: mol_type = genomic DNA
agcaccactacaaaaaatttagtttgaggtaaatatgtagtaatgacactaatgaactgtaaattagcttgtttgtcgttatttgtaatatgctatttaatccttctcataattttctggttcttttatatatataatggttctatgatcgatactagaagatcaatggcaccgtctatacttaaccaaaataggacaactgcagtcgtacctccctttccttcagagtctccgtaagtacacattaaacttgtcaaacctatctatgtgggccacctaatctaaagttcgtgtttcatgtagtttcgtgttatttgatgacgttgaagccataggcttactaacagtaaagagtgtctttgcgagaatagtcattaagtttcctagacgccgtgatagccaacatttcattctacaagacatcactgtgagttgcttcatcaaacattaaaataaagtcaaaatagtcatgtaattctattactcacgtgacctgcattctgaaatgtctagggataaaaaattgaagcaatttcataccacgataatgtccaacgatttgacgccgaactccaacaaggatctgcatatatattgtatggagtggcgttctgtgtaaactagggggcgtggcaatttcagaattttgtacataggctagaattgacattggcaacacataatgttgtctagccattcaacaagccgattttcagatcacctctttgagatttttcagcttcctctgtctgagcaagcctacgaacaatatattgaattaaatgaggcttggggacaaatcacggtgaccgacgcaaaggacacctggaagctcatttggggtctgaaattttctctacgaaaaagacttacaggcatttgatgggtcagactcaagttcatcagattttcagattgctttggaaaaataaatgtcaaccaaaacataaagtctttttttggctatggttaaaaaacagactcaacacaaggaatatgctaaggaggaaaaacatgacaattgagtcttacacctgcgagaactgcatctggcagaaggaggaaactctttatcatctcttcctcaggtgcaacttcgcgaaggcttactggaattcaatcggtttgatgccccctagaattgctaatccataggaggttgcgtcaaatctaaaacagcaactcaatgttcccttctctatggagatcattattctcatggcctggagcatttggaagtgccgtaatacttggctttttcagaacaaagatccaacagtgcaacaattcaagcatgagttcgcaaaagaattactcctagtcactcatagagctttgggtagatttgattctgccatcccagcatggcttcaacaatggcagtagaaactctccctcaccttctgtatttcgtctacttgtttgttctgaacaatgttttctttctagtttaaataaaattttcagtaggccccctcctgttctctaaaaaaataagccgattcagtttcttatatatccaaaacatcttatgtcattttataaaatcgtccaacaacctcataagatgtttgtaggtaacgacttgtctttctatattcaatatacttataccgacttaaccctaaaaattattcaaatttaactagaggtgaatggctcagattgccgtacgcgcgcagagcgggacgggacaagctcacggcggattctggtgctgggccgtacccgcgccctcgtagacctgaaccttgcccgtcccccctggccagccctctctataaaatccgtagcccagcagtgcatcacccgctgcccgtcttctacttgcgcggttgcgccctgcccctgcgtctgtacgcccccgcccccgtacggctatctaggctaccactcactggtcactggtcagactcagaaccccagcagcactgcgcagtgcagcgcatagttgatcagctgcagctcgtgcacgtagccgtgtgccgcgcgcggcggac

SEQ ID NO: 407 - DNA, 2000 bp, Zea mays
  source 1..2000: mol_type = genomic DNA
cttttttatatgtgtgacatttattctccgtaatattttgtccatggatctgacttgtgagtcatttttataaactaacgccaaagatgaatccatgtttcttacttggaaaccccgaacaaacaccactggcaggaggcgctcgcgttggcgtcgctcatcgacgatgagaagaagcttggcaactgccagttcgacctctggaagcagtcctacttggccgcatgcgtcgctatgttcagcaagctccggcgcatccatcgcttggacgtggtccagagcggctacaccgctgtccatattcaaacgagggacctcatagtcgttgccaacgccggcgactctcgggttgttctgggcaccgcatccgacgacggcgccgtcacgccatctagctcatcatccacctgaagctcaaccggccacgtaagtcgctactgaccggtcataaattcttgtgcgctgggacgacggttgttgttgatgttgtgtgagtgtcctcgaacaagatgtatgtagaggagtagcacatctggaggtgcaacggctaggtgtactacctcgctgatgagcacggggtgcacttcgtttagcagcccagccaaaagtcatcggtactcgccatgtcacgcgcgttcgacgactactatatcaaagactgtggcgtcatcttagcgacagaggtgacgcagaggaggaccgacaacaatgaccacttgccatcgccgaggtagcttttgtgctggcctacctttaattctcttcgcaaacgcacacacttgcctttttatttaagcaaacatgtatggttgtgcgtgcctgatgactgacgatgtacgagggaacttctaccgataggtgtggcacgtgctctctaatgatgagaccatgcaaatcatggtatatatcgaagtctgtatgatactgatggttgtaatgtagtagtgaaacagttaaattaaaataacaaaatttatatatggctaggatcacaaatgaattatgaaacattttcttataacaatataagacacattatatatataagttatcatggtattgtgtgtttccgttgcaacgcacgagccactcatctagtaatagtataagacgagatgtacaagcggagaaattgttggagagagccttattctttatcacgtaagtttggtcctcgctgcatttttttttcaatctgcgatgattaaaacgatatatattaagctgatgtgtggcgaatcttttgcgtcaacaggaaaccgataattgtgaggacgttgcaggcttgcagctcttgcctcgatctattgtgttttgtggagtccagcccatgagcccagtctccatccagtctctattggtgataagattaatagtactactagtacatactggtaccgaaaagcaaaaaaactgaagggtgaatccctgatcgccctgcactgcaccggcaaggcaacaagaaccagcaggaggccgtgtctgaaactgaaactggcaggaaactgcccaggcaagcagacaggggagagagacagaagggaaaggagaatcgatttcgaaacgggaaagcacgctggccagtccacacgtccttttccgcgcgacacgccctggctcttccttttcaccttcacgccccggccccagcccggttgcgttcgtccaggccgtgccatttcttaaagactcacccctgcacgactgcacctctgctgcactctgcaggggtagagaaaaaaagaggagagagagagagagagggaccgaccgatgaacggacggcatggctgatggctccaacgaacgcaggacaggtacaagtactacctgcaggctgcagcgcaactgccagtcgcccgccctctagccttcgtgccgtctgcccgcccgccgtctagtcctctcttcgttctcttgctctcgcgctagcagagcggaggaggaggagaccaaccgggttggtggacgtgggcgggaggtgtgtgcgtgtgtcgtcc

SEQ ID NO: 408 - DNA, 2000 bp, Zea mays
  source 1..2000: mol_type = genomic DNA
ttatcagtcacatctattttaaacttcactctgtaaactatatagtttatagtgtaaaataatgttttacacagtcatatatacgatctgctggccacaacctaatagatggaaaacttcgcaatgcggcatgagaaggtgttgaggaggtcgcgagcagggtctccggagtaaaatttgacgcttcaggtatgcatgttgatgtaactatgaaatctcgtgatgctacatttaaggaaattttgtatgaaatatatacatagcaatactaagttttcatcaaagttatctcctagttttactacacgacccacacgaggaaattcttgagaaggatgacaataaagttcccgtaaggaagaagagacaaaggatcacagttctgtttttggtgatgattccatttgattgtaaacctatagttataaatgggtgtttaagacgaagcttagagtgtgccttctcgtgcgatactttgaggctttcctagacctctgatcgcgagaagataaagcaaggaccgtgtataccaccatgtcaatttgtcaacgatatgtatatgcatgatccatcccgcacccatagattcattcattcattcatgcgtacacagttgcacgatttgtttgaatgagtggctcggtcaattaatgaaactagcactaattcaaaaggcgattcagttccgcgacaaacaagagagactgaaaaaggttgcttctacgagtggacaaagtgcatttaggatcagatcagaactccttgttgccggtacaggttgacgagattattaattgctaaccaaaacccctaagctccaatggattgctcgagcctcgccgagaatacgcacctgtctgcgccgccggttgttgtgaggtacatatcaacacaaataggtttaaattaactaatttgacgaagtgtactgagaatatatccaatgcaaagggtacatgattaatttgcgtatcatcttgatagccagatcgcacaagcaagggcctgtggacattgttgaagcgggcctatctctgcagttctgtacctttcagccgtatatatgtttactcaatggatgtgagacgacaaatgggggcaggccggcaggatagccagaacggttcacaccacaccgagacgcgtgttgttttttttttaaaaaaagaatttagagcaatagtatggcctgtttggttcgctgtaacttgctacatcttgtctaacttttctacctaaggttagttattcaattcgaattaataaccttagacaaagtgtagcacatttagccacgaaccaaacaggcccgtgacatgttcaaactaataagccacaaagtaatggcggcccaggttgtgttggcaattggcatcgacggaattccgatgaaatacacagcacggcaatttattagctgcttggcagttcaatttttcccctacctagttttctagacatatgcttcctctgccttaaaaaacgtagtcgtttagctttaattttatgtctatattcaaataaataatgctaaaactagacatatataaaacacatacattaactattgtatgaattcattatttttttaaaacgaattttattttgcaacacagggagtataatttaacgtggatgtcgtcgacgacgactagacgatgatggcgacccagtttgcatgcacgcagcaggcttggtcaacttgccatgctgctgctcattcgttggcgccgtgatataagcccgggagacgcgaccaaaccttttgcagtaatccctctcgctgctccctcagtctccttcctcctctctgcattccgtgattctgtcgcctccgctccatccctctcgcactggatcatccaccataaatatagctcgtgccggtcgatcggccgtgcaggtgaaagtagcggcgcgaagccaggtagctagctagctaggaaattaaaaaggggccagccggggaacgatcacgacgagctaggggcgccggagcc

SEQ ID NO: 409 - DNA, 2000 bp, Zea mays
  source 1..2000: mol_type = genomic DNA
aatgttacatctttagtaccgattcaggccaaaacccgatactaaagttctttttttagtatggttcatacaatcaggactgaagattgagacctttagtctcggatgtcaagtactggttgaaagtccggtattgtagccggttggcaatgggtatataaatgtcgcattatgcagtattgtgtgcttgagccgtcgtgaaaagaaaatagaaaacaatcttttaacatctttctcacatctccattgtttcgacgaacgacacttctctctcttctcgcacactccatgtttgttttcccttttagcaatcttgtgcttggaacctgattttggtgaagacgaacacactacggccggcggcataggaagcttcaagcagactatacacatgtgaatccgttgttgcgaaacctttgaaagatgtcggaacggcaggggtcgtagtcaaagccagaaacctggaaccctgcacacaacagcacagcacagcacatcgtcttccttccggttttgttctcgttgcataaccgaacattaaaaataaaagcaggtagcactagcagccgtatgagttgtcttcggccctgtgtgaactatacgatggccatctccgttcgctccgttcctatctgcacagtcttcgccggcgcaaaaaggcccagacgtatgcgccttggctactgtttgtttactctttttttcccgccaaagcgactgtgggcgaaggtcttcgtcgtctaaacaggggaaggaaagacgagagtgcccaccctagacttggaggagtgtacactcctccttcgagacgatgacaagggtcaaacgggttggtggtgttgcgtcgtaacggccggcgacgcgaagaatgccccccggcagcggcaggtagcgcacagcacagcacaatcctgtgagtcaccccacgcttgaccccccgccgcaccgctctgctgctgcttcgcgcgctcggcgtcccccggccctaccctagtaagccgaaagggaaaggcgtacgtccaagcaatccatacggatacggccatgctcgcgagcctcgcgttctttctttttatatcccgtggcgtggcggtgtccgcatgggtgcagtgcagcgcagcgcaggtttgacgaagcgtgcgtcgcatgggcacacagacaggttctaaacacaagcttttatttatataatcaacgacgacgcacctgcgtttgtcaacaataatgcctaaggaaggactgtatttgaaggaagtgttgtgcagtagccacagggacgcggttgcaaaggaactactccctccgtttctttttatttgtcgctgtatagtgtaaaattgcactatccagcgacaaataaaaataaacggagggattacgtacatttttctagtctgtctagtgggggtgacataaaaatgacgctcctcaccgcgtgcttgcagggggtggtagtggtacaaaggacaagcgccacttgtatgcctgtggacaagcacaaccggacggattgactaaactcacgagtagtaaaactcgcaagtactggtcaacacacacatgagtattatagaagcaaaatgtatgtatatattttttttgcaaaacaaactgggacagggacgaacaataatacggccgtggggggacggggacggctccgcaaaatggtcgcacctggcccacgcccactatcccaggccccagaccccgaacgcgcgcctggagctggtgctggctcagggactcgaggtgtgaagctgcctgcctgcctgccgctataaaacacgcctgcgctccccacaggccgcagctcgcttgctggccttgttgcctgcccaccttgtgccagaaaacacacggccgccacccccccccccccccccaccccccctcccccacccccccccccccccccccccccccccccccccccccgcgccaccacccagttcttcgatcccattccaagcgcgcgcagcagcagcagcagcgccagc

SEQ ID NO: 410 - DNA, 2000 bp, Zea mays
  source 1..2000: mol_type = genomic DNA
atcgaggtggtacaatgtgatagcgtgtgagttcctatcgtgttggccggtttgagtaatttcctatggcctgttagtagaggcgagaagagaggggaacagacctacgctcttctccgaatgcgacgcacaacgcaagacaaggagtagagatgcgaaactttatgagagttgcattcttgtccatctttaacatgcccttgtgcttgcgcaggcacgagcacgacccccgacgtgtcatatatatgcgtaaataaactgctagtaggatatatatgatctcacacgcggctagctctggggatgaacaagtccactccagatcagggtcaaagcagatgacagcatgcgcgaggatgctgccgcattgtcagttgcaactgcccatggacttttggcggcaggtcagcctagctagcaatggcaattagcagcagtagggccagcagccgccggcggggtccccccaacgaacgaacgcgctgtgcattggttcggtgtgatgggtctccggccttccgttccacccggagagttagggttcgcagcagtacagccataactgaatggaaggactcgcgtcgataggatcggactcgtcgtcattctgacgacgaccggccggccggagctctgtacgtacgcctgtggagtacgtagtactccgtccgcgtcgcaggagtagctaggagggagagtacgtacgcttgctgtcaacgtactgctacgacgtgaattattggtgatgccattcgatctcttaccagtttcgagaggaacctgcttgatgacgttgtatggagactttaagttgcatgcatgcacggtactactgtatactaagtgttttgactgatgactactggtgggagggaatgagaatttatatctttggaaccaaggaaaagtggaggaaattttcctatgtgtggtcctttggaacaaaggatcagtttcctactaatcctataaaatttctgtgaaattagatcattattattgtagtgagatttttaaaggatttctaacgtgaggtccaacctctcgaattttttttctatgaaattgaaagtgccatgtgcaacttttaactctaatcctacgtttctcctgtccctgtatgcatgtttcgtcaatcctgcattccaaaggagccctaatgcatagtagtattgagataaggttgtgtgctgctttttgaaatggaaaggaatcatgtcctcgtttttcattttattaggtggggacatgcatgcgcgtgggcatggaggaaagagattaactcgcaatctgggttgttttagcaaaaccagctaatcacaatctgggatgtattctttttcccactaaggacctgagttggaccatatggaaattcctcaaggatatatatacgagctgctttgggccctgcgtacgtggttaatttcatcatatatatgtatctcgattcaatgatgattaaccgatgccaatgcccagcttcgtgcttatcccatgcatcaatcaacaacggtgattctaatggctactagatgcatggcgacaagaagtaacagtggagatcgcatactgccttcttatccgttgacacgttccattatatatattggttgtcaagcaatgcatatgcatggtaaaaatgtcttgcagagtagtagtagctgtgttcatcgtggctcgtgcattcctcgcctgccctaaatcctatcgtattatttgtcaatactatgctagctagcgtatttgtcaccttctctgccgttctgcttctgcagcattgcagaggaatatggcatatgtagctagcttagctagggtggccaaggaaacaaaagaatgaagaagaagaccgatgcgaaagctagcttgtgtcagcatcaaggtcaaaccatatccgtaccttttgaagtcctataaatactgggcgcggcgccgcgcagaccaccccacgaccaaattaaaccaataagctgcaaccgccagcgcacacgggggag

SEQ ID NO: 411 - DNA, 2000 bp, Zea mays
  source 1..2000: mol_type = genomic DNA
tgcgagcacagggagagtgggagagcgggctccgaaatcgctatccgtagagctacacttgcattgcacgggtgtgctggcgatcaggcttttgtggagtgtactagcgactgctcacttcgtccgctcgaccagcgctgatcaggttactcgtcgccggcgccattcgaggtactgcactgcgtacatctgccggcatcgactacgtacgaacaactacatcgaacatacacacgagatgtctcgtgtgaatggagctactgatgccttgagcatcggtccctccgctgggtacactctgttcttcgtatttgtacatgttttgttgttgtttactgcttatctgagtagtgatacatacatgcacatacataacgtcacatatatcatattgtttttctgaattaaattaaaactgataatgcctaattttaagatgggaggtcgttgcatcgattgcatacgttgtgtttagtatacctctactactatacacagtactctctctatatgtcatgtgtgtagtaaataataataataataataataataataataataataataataataataataataataataataataataataataataataataataataataataataaagcatccggtattaggtagctttacttgcctatatatcgtttgtttatggtcaatatgatgttagctgtttgaaacatacaggaagcggtgagccaacgcaattgattcgaaacctggtgtgtctggagtcatatagctagcttcatgggcagtcgtccagcccatacgcatctgcagccgcagtagtgcaaaaaaaaaaaaaaaaaaatggaggaggagtgctcaaccggccggccggcgttgtcaatgcaatggcggatgatttgatgtcacggcgatcgataaacaacaaccagtgaatgagcttgtggaaagccatggatagggataagcagctaggcaaaaggcagcatgcatgtttatgcagagggttaattatgttacacgccaaataaaccggggacggtcggcagcggatcgagaggctctcctcctgtgtatagtacaaactagcggacgacaaatattcgagaacagaacacagattggatcgcctcgccgtcttttcagaccatcagatgcgggtagcccatgcatagtttctacttctgcacatgcatactgcagatcagtattcaaaggcatagcgtgtgaaacgaacgagacctcctcctgttctgctggatcgagatgatctgccatataaagctagctagcagaatgttactactacgtactactagagactcgttcttgcatattggctacaagcgtggattggcaggactgtggcgtcggcaattgtgtcactcaaaccgtgtgcttgtcgagagagggagagggagagggagagagtagctagggaacacactctttttgcaagcagaagatcctgacgagtgcatgggtgggtgggggtgctactacgattatattaggccccgtcgtagtgactagctagtactactagtgagatcctcccaaggaaaacaatgatatggttcattagagcgtgttgtggagcctaccaaccgtctcatcagccatcacattcccccgtatttttctcccggtgtccggtggtcgcccgccgtgccccgccgcccgcggctataaagctcggcgccaccttcctggcctgttccggactcgctcgcacccgggcaccagcaggctctccgatccatccatcgcccactactactgctagaccacctgcctgcctgtgcctagctaccacgacgacacacctcatcgccccatatccgcctgcctgccttcccatcacatatatctcccactcgtccttcttgctccggccgacgagatctccatatatacctgctagcgagcgagcgacgacgcgaggcgcgctagctagctagctgttggcttgagatcgatccgtcgactaagctatagctagcagcc